(19) United States
(12) Patent Application Publication
(10) Pub. No.: US 2024/0110206 A1
(43) Pub. Date: Apr. 4, 2024

(54) BIOSYNTHESIS OF CANNABINOIDS AND CANNABINOID PRECURSORS

(71) Applicant: Ginkgo Bioworks, Inc., Boston, MA (US)

(72) Inventors: Dylan Alexander Carlin, Jamaica Plain, MA (US); Brian Carvalho, Somerville, MA (US); Nicholas Flores, Cambridge, MA (US); Katrina Forrest, Seattle, WA (US); Gabriel Rodriguez, Central, SC (US); Nathan W. Schmidt, Milton, MA (US); Michelle Spencer, Boston, MA (US)

(73) Assignee: Ginkgo Bioworks, Inc., Boston, MA (US)

(21) Appl. No.: 18/031,522

(22) PCT Filed: Oct. 12, 2021
(86) PCT No.: PCT/US2021/054641

§ 371 Date: Apr. 12, 2023

Related U.S. Application Data
(60) Provisional application No. 63/188,442, filed on May 13, 2021.
(60) Provisional application No. 63/091,292, filed on Oct. 13, 2020.

(51) Int. Cl. C12P 7/42; C12N 9/10; C12N 15/62; C12N 15/81

(52) U.S. Cl. CPC C12P 7/42; C12N 9/1029; C12N 9/1085; C12N 15/62; C12N 15/81; C12Y 203/01206; C12Y 205/0101

(57) ABSTRACT

Aspects of the disclosure relate to biosynthesis of cannabinoids and cannabinoid precursors in recombinant cells and in vitro. Specifically, the disclosure is directed to a prenyltransferase variant, a chimeric prenyltransferase comprising one or more portions of at least two different prenyltransferase proteins, and a fusion polypeptide comprising a CBG-type producing prenyltransferase and farnesyl pyrophosphate synthase.

### CROSS REFERENCE TO RELATED APPLICATIONS

[0001] This application claims the benefit under 35 U.S.C. § 119(e) of U.S. Provisional Application No. 63/091,292, filed Oct. 13, 2020, entitled “BIOSYNTHESIS OF CANNABINOIDS AND CANNABINOID PRECURSORS” and U.S. Provisional Application No. 63/188,442, filed May 13, 2021, entitled “BIOSYNTHESIS OF CANNABINOIDS AND CANNABINOID PRECURSORS,” the entire disclosures of each of which are hereby incorporated by reference in their entireties.

### REFERENCE TO A SEQUENCE LISTING SUBMITTED AS A TEXT FILE VIA EFS-WEB

[0002] The instant application contains a Sequence Listing which has been submitted in ASCII format via EFS-Web and is hereby incorporated by reference in its entirety. Said ASCII copy, created on Oct. 8, 2021, is named G091970063WO00-SEQ-OMJ, and is 3,122,581 bytes in size.

### FIELD OF INVENTION

[0003] The present disclosure relates to the biosynthesis of cannabinoids and cannabinoid precursors, such as in recombinant cells.

### BACKGROUND

[0004] Cannabinoids are chemical compounds that may act as ligands for endocannabinoid receptors and have multiple medical applications. Traditionally, cannabinoids have been isolated from plants of the genus Cannabis. The use of plants for producing cannabinoids is inefficient, however, with isolated products often limited to the two most prevalent endogenous cannabinoids. THC and CBD, as other cannabinoids are typically produced in very low concentrations in Cannabis plants. Further, the cultivation of Cannabis plants is restricted in many jurisdictions. In addition, in order to obtain consistent results, Cannabis plants are often grown in a controlled environment, such as indoor grow rooms without windows, to provide flexibility in modulating growing conditions such as lighting, temperature, humidity, airflow, etc. Growing Cannabis plants in such controlled environments can result in high energy usage per gram of cannabinoid produced, especially for rare cannabinoids that the plants produce only in small amounts. For example, lighting in such grow rooms is provided by artificial sources, such as high-powered sodium lights. As many species of Cannabis have a vegetative cycle that requires 18 or more hours of light per day, powering such lights can result in significant energy expenditures. It has been estimated that between 0.88-1.34 kWh of energy is required to produce one gram of THC in dried Cannabis flower form (e.g., before any extraction or purification). Additionally, concern has been raised over agricultural practices in certain jurisdictions, such as California, where the growing season coincides with the dry season such that the water usage may impact connected surface water in streams (Dillis, Christopher, Connor McIntee, Van Butsic, Lance Le, Kason Grady, and Theodore Grantham. “Water storage and irrigation practices for Cannabis drive seasonal patterns of water extraction and use in Northern California.” Journal of Environmental Management 272 (2020): 110955).

[0005] Cannabinoids can also be produced through chemical synthesis (see, e.g., U.S. Pat. No. 7,323,576 to Souza et al). However, such methods suffer from low yields and high cost.

[0006] Production of cannabinoids, cannabinoid analogs, and cannabinoid precursors using engineered organisms may provide an advantageous approach to meet the increasing demand for these compounds.

### SUMMARY

[0007] Aspects of the present disclosure provide methods for production of cannabinoids and cannabinoid precursors from fatty acid substrates using genetically modified host cells.

[0008] Aspects of the disclosure relate to chimeric prenyltransferases (PTs), wherein the chimeric PT comprises one or more portions of at least two different PTs and wherein the chimeric PT is capable of producing a CBG-type cannabinoid from a resorcylic acid. In some embodiments, the CBG-type cannabinoid and the resorcylic acid are: cannabigerolic acid (CBGA) and olivetolic acid; or cannabigerovarinic acid (CBGVA) and divaric acid (DA).

[0009] In some embodiments, the chimeric PT comprises one or more portions of CsPT1. In some embodiments, the chimeric PT comprises one or more portions of CsPT4. In some embodiments, the chimeric PT comprises one or more portions of CsPT6. In some embodiments, the chimeric PT comprises one or more portions of CsPT7.

[0010] In some embodiments, the chimeric PT comprises multiple transmembrane helices, and at least one transmembrane helix of the multiple transmembrane helices comprises one or more portions of at least two different CsPTs. In some embodiments, at least one transmembrane helix of the multiple transmembrane helices comprises both a portion of CsPT4 and a portion of CsPT1, CsPT6 or CsPT7. In some embodiments, all the transmembrane helices comprise both a portion of CsPT4 and a portion of CsPT1, CsPT6 or CsPT7.

[0011] In some embodiments, the chimeric PT comprises one or more of the following motifs: MTVMGMT (SEQ ID NO: 11); [EV][LMW][RS]P[SAP]F[ST]F[IL][IL]AF (SEQ ID NO: 12); QFFEFIW (SEQ ID NO: 13), HNTNL (SEQ ID NO: 14); TCWKL (SEQ ID NO: 15); M[IL]LSHAILAFC (SEQ ID NO: 16); HVG[LV][AN]FT[SCF]Y[YS]A[ST][RT][AS]A[LF] (SEQ ID NO: 17); GLIVT (SEQ ID NO: 18); L[YH]YAEY[LF]V (SEQ ID NO: 19); KAFFAL (SEQ ID NO: 20); KLGARNMT (SEQ ID NO: 21); QAF[NK]SN (SEQ ID NO: 22); LIFQT (SEQ ID NO: 23), SIIVALT (SEQ ID NO: 24); MSIETAW (SEQ ID NO: 25); VVSGV (SEQ ID NO: 26); RPYVV (SEQ ID NO: 27); KPDLP (SEQ ID NO: 28); RWKQY (SEQ ID NO: 29); FLITI (SEQ ID NO: 30); DIEGD (SEQ ID NO: 31); and KYGVST (SEQ ID NO: 32).

[0012] In some embodiments, the chimeric PT comprises the structure: X1-X2-X3-X4-X5-X6-X7-X8-X9-X10, wherein at least one of X1, X2, X3, X4, X5, X6, X7, X8, X9 or X10 comprises a portion of CsPT4. In some embodiments, at least one of X1, X3, X5, X7, and X9 comprises a portion of CsPT4. In some embodiments, all of X1, X3, X5, X7, and X9 comprise portions of CsPT4. In some embodiments, at least one of X2, X4, X6, X8, and X10 comprises a portion of CsPT1, CsPT6, or CsPT7. In some embodiments, all of X2, X4, X6, X8, and X10 comprise portions of CsPT1, CsPT6 or CsPT7.

[0013] In some embodiments, the chimeric PT comprises the structure: X1-X2-X3-X4-X5-X6-X7-X8-X9-X10, and: the sequence of X1 comprises any of SEQ ID NOs: 33-39 or a sequence that comprises no more than 2 amino acid substitutions, insertions, additions or deletions relative to any one of SEQ ID NOs: 33-39; the sequence of X2 comprises any of SEQ ID NOs: 40-46 or a sequence that comprises no more than 2 amino acid substitutions, insertions, additions or deletions relative to any one of SEQ ID NOs: 40-46; the sequence of X3 comprises any of SEQ ID NOs: 47-53 or a sequence that comprises no more than 2 amino acid substitutions, insertions, additions or deletions relative to any one of SEQ ID NOs: 47-53; the sequence of X4 comprises any of SEQ ID NOs: 54-60 or a sequence that comprises no more than 2 amino acid substitutions, insertions, additions or deletions relative to any one of SEQ ID NOs: 54-60; the sequence of X5 comprises any of SEQ ID NOs: 61-67 or a sequence that comprises no more than 2 amino acid substitutions, insertions, additions or deletions relative to any one of SEQ ID NOs: 61-67; the sequence of X6 comprises any of SEQ ID NOs: 68-74 or a sequence that comprises no more than 2 amino acid substitutions, insertions, additions or deletions relative to any one of SEQ ID NOs: 68-74; the sequence of X7 comprises any of SEQ ID NOs: 75-81 or a sequence that comprises no more than 2 amino acid substitutions, insertions, additions or deletions relative to any one of SEQ ID NOs: 75-81; the sequence of X8 comprises any of SEQ ID NOs: 82-88 or a sequence that comprises no more than 2 amino acid substitutions, insertions, additions or deletions relative to any one of SEQ ID NOs: 82-88; the sequence of X9 comprises any of SEQ ID NOs: 89-95 or a sequence that comprises no more than 2 amino acid substitutions, insertions, additions or deletions relative to any one of SEQ ID NOs: 89-95; and/or the sequence of X10 comprises any of SEQ ID NOs: 96-102 or a sequence that comprises no more than 2 amino acid substitutions, insertions, additions or deletions relative to any one of SEQ ID NOs: 96-102.

[0014] In some embodiments, the chimeric PT comprises a sequence that is at least 90% identical to any one of SEQ ID NOs: 113-121, 757-868, and 982-1081. In some embodiments, the chimeric PT comprises any one of SEQ ID NOs: 113-118, 757-868, and 982-1081.

[0015] In some embodiments, the chimeric PT comprises an amino acid substitution relative to SEQ ID NO: 5 at one or more of the following positions within SEQ ID NO: 5: C31, M43, M75, I46, F82, F83, I86, M87, D94, E113, F145, I147, F151, Q162, A227, S232, F245, Q267, Q288, and L311. In some embodiments, the chimeric PT comprises one or more of the following amino acid substitutions relative to SEQ ID NO: 5: C31F, M43V, M43L, I46C, M75V, F82G, F83Y, I86S, I86A, I86G, I86V, I86S, M87V, M87I, D94E, E113R, I140L, F145T, F145L, F145S, I147L, F151T, A227K. S232R, F245R, F245W, T254N, Q267F, Q288R, L331N, and L311R. In some embodiments, the chimeric PT is capable of producing more CBGA from olivetolic acid or more CBGVA from divaric acid than a chimeric PT that comprises SEQ ID NO:324.

[0016] Further aspects of the disclosure relate to polynucleotides encoding any of the chimeric PTs of the disclosure. In some embodiments, the polynucleotide comprises a sequence that is at least 90% identical to any one of SEQ ID NOs: 136-144, 869-980, and 1083-1182. In some embodiments, the polynucleotide comprises the sequence of any one of SEQ ID NOs: 136-144, 869-980, and 1083-1182.

[0017] Further aspects of the disclosure relate to fusion proteins comprising chimeric PTs of the disclosure wherein the fusion protein further comprises a farnesyl pyrophosphate synthase. In some embodiments, the farnesyl pyrophosphate synthase comprises a mutation that increases the production of geranylpyrophosphate relative to farnesylpyrophosphate. In some embodiments, the farnesyl pyrophosphate synthase sequence comprises a tryptophan residue at a residue corresponding to residues 96, 127, or both 96 and 127, in wild-type ERG20 (SEQ ID NO: 424).

[0018] In some embodiments, the farnesyl pyrophosphate synthase is amino terminal to the chimeric prenyltransferase within the fusion protein. In some embodiments, the farnesyl pyrophosphate synthase and the chimeric prenyltransferase are separated by a linker sequence. In some embodiments, the linker comprises any one of SEQ ID NOs: 104-109, or a sequence that comprises no more than 2 amino acid substitutions, insertions, additions or deletions relative to any one of SEQ ID NOs: 104-109.

[0019] In some embodiments, the sequence of the farnesyl pyrophosphate synthase comprises one or more of the following motifs: NVPGGKLNR (SEQ ID NO: 647); FYLPVALA[LM]H (SEQ ID NO: 648); A[EH]D[IV]LIPLG (SEQ ID NO: 651); LGW[CL][ITV]ELLQA[FY]FL (SEQ ID NO: 655); KKEV[FL][ET][SA]FL[AGN]KIYK (SEQ ID NO: 663), QRK[VI]L[DE]ENYG (SEQ ID NO: 667); VGMIAIWD (SEQ ID NO: 672); TDI[QK]DNKCSW (SEQ ID NO: 673); TAYYSFYLP (SEQ ID NO: 676); GKIGTDI[QK]DNKCSW (SEQ ID NO: 677); ILIP[LM]GEYFQ (SEQ ID NO: 680); IL[VM][EP][ML]G[ET][YF]FQ (SEQ ID NO: 683); AKIYKRSK (SEQ ID NO: 685); DPEVIGKI (SEQ ID NO: 686); RGQPCW[YF]RVP[EQ] (SEQ ID NO: 687); IVKYKTA[YF]Y[ST]FYLP (SEQ ID NO: 689); WC[IV]E[LW]LQA[YF][WF]LV[ALW]D (SEQ ID NO: 692); CSWLV[VN]Q[AC]L[AQ][RI][AC][ST]P[ED]Q (SEQ ID NO: 699).

[0020] In some embodiments, the farnesyl pyrophosphate synthase comprises a sequence that is at least 90% identical to any one of SEQ ID NOs: 103, 426-476, or 753. In some embodiments, the farnesyl pyrophosphate synthase comprises any one of SEQ ID NOs: 426-476 or 753.

[0021] In some embodiments, the fusion protein comprises a sequence that is at least 90% identical to any one of SEQ ID NOs: 532-582 or 755. In some embodiments, the fusion protein comprises any one of SEQ ID NOs: 532-582 or 755.

[0022] Further aspects of the disclosure relate to host cells comprising any of the chimeric PTs or fusion proteins associated with the disclosure. In some embodiments, the host cell comprises one or more copies of a heterologous farnesyl pyrophosphate synthase. In some embodiments, one or more copies of the farnesyl pyrophosphate synthase are integrated into the genome of the host cell. In some embodiments, the host cell is a plant cell, an algal cell, a yeast cell, a bacterial cell, or an animal cell. In some embodiments, the host cell is a yeast cell. In some embodiments, the yeast cell is a Saccharomyces cell, a Yarrowia cell, a Komagataella cell, or a Pichia cell. In some embodiments, the Saccharomyces cell is a Saccharomyces cerevisiae cell. In some embodiments, the host cell is a bacterial cell. In some embodiments, the bacterial cell is an E. coli cell.

[0023] In some embodiments, the host cell further comprises one or more heterologous polynucleotides encoding one or more of: an acyl activating enzyme (AAE), a polyketide synthase (PKS), a polyketide cyclase (PKC), and/or a terminal synthase (TS). In some embodiments, the PKS is an olivetol synthase (OLS).

[0024] Further aspects of the disclosure relate to methods comprising culturing any of the host cells associated with the disclosure.

[0025] Further aspects of the disclosure relate to host cells that comprises a heterologous polynucleotide encoding a farnesyl pyrophosphate synthase wherein the sequence of the farnesyl pyrophosphate synthase comprises one or more of the following motifs: NVPGGKLNR (SEQ ID NO: 647); FYLPVALA[LM]H (SEQ ID NO: 648); A[EH]D[IV]LIPLG (SEQ ID NO: 651); LGW[CL][ITV]ELLQA[FY]FL (SEQ ID NO: 655); KKEV[FL][ET][SA]FL[AGN]KIYK (SEQ ID NO: 663); QRK[VI]L[DE]ENYG (SEQ ID NO: 667); VGMIAIWD (SEQ ID NO: 672); TDI[QK]DNKCSW (SEQ ID NO: 673); TAYYSFYLP (SEQ ID NO: 676); GKIGTDI[QK]DNKCSW (SEQ ID NO: 677); ILIP[LM]GEYFQ (SEQ ID NO: 680); IL[VM][EP][ML]G[ET][YF]FQ (SEQ ID NO: 683); AKIYKRSK (SEQ ID NO: 685); DPEVIGKI (SEQ ID NO: 686); RGQPCW[YF]RVP[EQ](SEQ ID NO: 687); IVKYKTA[YF]Y[ST]FYLP (SEQ ID NO: 689); WC[IV]E[LW]LQA[YF][WF]LV[ALW]D (SEQ ID NO: 692); CSWLV[VN]Q[AC]L[AQ][RI][AC][ST]P[ED]Q (SEQ ID NO: 699); wherein the farnesyl pyrophosphate synthase does not comprise SEQ ID NO: 103 or SEQ ID NO: 424.

[0026] In some embodiments, the farnesyl pyrophosphate synthase comprises a sequence that is at least 90% identical to any one of SEQ ID NOs: 426-476 or 753. In some embodiments, the farnesyl pyrophosphate synthase comprises any one of SEQ ID NOs: 426-476 or 753.

[0027] Further aspects of the disclosure relate to polynucleotides encoding a chimeric PT, wherein the polynucleotide comprises a sequence that is at least 90% identical to any one of SEQ ID NOs: 136-144, 869-980, and 1083-1182.

[0028] Further aspects of the disclosure relate to non-naturally occurring polynucleotides encoding a farnesyl pyrophosphate synthase, wherein the non-naturally occurring polynucleotide comprises a sequence that is at least 90% identical to any one of SEQ ID NOs: 479-529 or 754.

[0029] Further aspects of the disclosure relate to polynucleotides encoding a fusion protein, wherein the polynucleotide comprises a sequence that is at least 90% identical to any one of SEQ ID NOs: 585-635, 728-752 or 756.

[0030] Further aspects of the disclosure relate to vectors comprising any of the polynucleotides associated with the disclosure. Further aspects of the disclosure relate to expression cassettes comprising any of the polynucleotides associated with the disclosure. Further aspects of the disclosure relate to host cells transformed with any of the polynucleotides associated with the disclosure, any of the vectors associated with the disclosure, or any of the expression cassettes associated with the disclosure.

[0031] Further aspects of the disclosure relate to variant PTs or active fragments thereof comprising a non-naturally occurring amino acid sequence relative to a wild-type PT, wherein the variant PT or active fragment thereof acts on a substrate to produce an altered amount of a cannabinoid relative to the amount of the cannabinoid produced by the wild-type PT. In some embodiments, the variant PT or active fragment thereof comprises an amino acid substitution relative to a prenyltransferase of SEQ ID NO: 5. In some embodiments, the variant PT or active fragment thereof comprises an amino acid substitution relative to SEQ ID NO: 5 at one or more of the following positions within SEQ ID NO: 5: C31, M43, I46, F82, F83, I86, M87, D94, E113, S119, V122, F145, I147, F151, Q162, S232, F245, Q267, Q288, and L311. In some embodiments, the PT comprises one or more of the following amino acid substitutions relative to SEQ ID NO: 5: C31F, M43V, M43L, I46C, F82G, F83Y, I86S, I86A, I86G, I86V, I86S, M87V, M87I, D94E, E113R, F145T, F145L, F145S, I147L, F151T, S232R, F245R, F245W, Q267F, Q288R, L331N, and L311R.

[0032] In some embodiments, the variant PT or active fragment thereof produces an increased amount of CBGA relative to the amount of CBGA produced by the wild-type PT. In some embodiments, the variant PT or active fragment thereof produces an increased amount of CBGVA relative to the amount of CBGVA produced by the wild-type PT.

[0033] Further aspects of the disclosure relate to polynucleotides encoding variant PTs or active fragments thereof. Further aspects of the disclosure relate to vectors comprising variant PTs or active fragments thereof. Further aspects of the disclosure relate to expression cassettes comprising variant PTs or active fragments thereof. Further aspects of the disclosure relate to host cells transformed with polynucleotides, vectors, or expression cassettes comprising variant PTs or active fragments thereof.

[0034] Further aspects of the disclosure relate to methods of producing a cannabinoid comprising reacting:
[0035] a) a CBG-type compound, and
[0036] b) a prenyl pyrophosphate, in the presence of: a chimeric PT associated with the disclosure, a PT encoded by a polynucleotide associated with the disclosure, a fusion protein associated with the disclosure, or a variant PT associated with the disclosure.

[0037] In some embodiments, the compound of Formula (6) is CBGA or CBGVA. In some embodiments, the prenyl pyrophosphate is geranyl pyrophosphate.

[0038] Further aspects of the disclosure relate to bioreactors for producing a cannabinoid compound. In some embodiments, the bioreactors comprise a chimeric PT associated with the disclosure, a PT encoded by a polynucleotide associated with the disclosure, a fusion protein associated with the disclosure, a variant PT associated with the disclosure, and/or a host cell associated with the disclosure.

[0039] Each of the limitations of the invention can encompass various embodiments of the invention. It is, therefore, anticipated that each of the limitations of the invention involving any one element or combinations of elements can be included in each aspect of the invention. This disclosure is not limited in its application to the details of construction and the arrangement of components set forth in the following description or illustrated in the drawings. The invention is capable of other embodiments and of being practiced or of being carried out in various ways. Also, the phraseology and terminology used in this application is for the purpose of description and should not be regarded as limiting. The use of “including,” “comprising,” or “having,” “containing,” “involving,” and variations thereof, is meant to encompass the items listed thereafter and equivalents thereof as well as additional items.

### BRIEF DESCRIPTION OF DRAWINGS

[0040] The accompanying drawings are not intended to be drawn to scale. In the drawings, each identical or nearly identical component that is illustrated in various figures is represented by a like numeral. For purposes of clarity, not every component may be labeled in every drawing. In the drawings:

[0041] FIG. 1 is a schematic depicting the native Cannabis biosynthetic pathway for production of cannabinoid compounds, including five enzymatic steps mediated by: (R1a) acyl activating enzymes (AAE); (R2a) olivetol synthase enzymes (OLS); (R3a) olivetolic acid cyclase enzymes (OAC); (R4a) prenyltransferase enzymes (PT); and (R5a) terminal synthase enzymes (TS). Formulae 1a-11a correspond to hexanoic acid (1a), hexanoyl-CoA (2a), malonyl-CoA (3a), 3,5,7-trioxododecanoyl-CoA (4a), olivetol (5a), olivetolic acid (6a), geranyl pyrophosphate (7a), cannabigerolic acid (8a), cannabidiolic acid (9a), tetrahydrocannabinolic acid (10a), and cannabichromenic acid (11a). Hexanoic acid is an exemplary carboxylic acid substrate; other carboxylic acids may also be used (e.g., butyric acid, isovaleric acid, octanoic acid, decanoic acid, etc.; see e.g., FIG. 3 below). The enzymes that catalyze the synthesis of 3,5,7-trioxododecanoyl-CoA and olivetolic acid are shown in R2a and R3a, respectively, and can include multi-functional enzymes that catalyze the synthesis of 3,5,7-trioxododecanoyl-CoA and olivetolic acid. The enzymes cannabidiolic acid synthase (CBDAS), tetrahydrocannabinolic acid synthase (THCAS), and cannabichromenic acid synthase (CBCAS) that catalyze the synthesis of cannabidiolic acid, tetrahydrocannabinolic acid, and cannabichromenic acid, respectively, are shown in step R5a. FIG. 1 is adapted from Carvalho et al. “Designing Microorganisms for Heterologous Biosynthesis of Cannabinoids” (2017) FEMS Yeast Research June 1:17(4), which is incorporated by reference in its entirety.

[0042] FIG. 2 is a schematic depicting a heterologous biosynthetic pathway for production of cannabinoid compounds, including five enzymatic steps mediated by: (RI) acyl activating enzymes (AAE); (R2) polyketide synthase enzymes (PKS) or bifunctional polyketide synthase-polyketide cyclase enzymes (PKS-PKC); (R3) polyketide cyclase enzymes (PKC) or bifunctional PKS-PKC enzymes; (R4) prenyltransferase enzymes (PT); and (R5) terminal synthase enzymes (TS). Any carboxylic acid of varying chain lengths, structures (e.g., aliphatic, alicyclic, or aromatic) and functionalization (e.g., hydroxylic-, keto-, amino-, thiol-, aryl-, or alogeno-) may also be used as precursor substrates (e.g., thiopropionic acid, hydroxy phenyl acetic acid, norleucine, bromodecanoic acid, butyric acid, isovaleric acid, octanoic acid, decanoic acid, etc).

[0043] FIG. 3 is a non-exclusive representation of select putative precursors for the cannabinoid pathway in FIG. 2.

[0044] FIG. 4 is a schematic showing a reaction catalyzed by a PT enzyme wherein Olivetolic Acid (OA, Formula (6a)) and Geranyl Pyrophosphate (GPP, Formula (7a)) are condensed to form either the major cannabinoid Cannabigerolic Acid (CBGA, Formula (8a)) or 2-O-Geranyl Olivetolic Acid (OGOA, Formula (8b)).

[0045] FIGS. 5A-5B depict 3-D structural models showing regions that were targeted for mutagenesis in a representative C. sativa PT (CsPT) protein. FIG. 5A depicts an approach whereby point mutations were generated at locations (depicted in black) spread throughout the whole sequence of a CsPT protein based on bioinformatics analysis. FIG. 5B depicts an approach whereby point mutations were focused within regions (depicted in black) near the active site of a representative CsPT protein. The active site is located around the pair of Mg2+ ions (depicted as spheres) and GPP substrate (depicted as sticks).

[0046] FIG. 6 depicts the crystal structure of the PT AfUbiA from A. fulgidus (corresponding to PDB ID 4TQ3; UniProt Accession No. 028625).

[0047] FIGS. 7A-7B depict approaches used to generate chimeras involving CsPT enzymes. FIG. 7A depicts an example of a “within membrane” approach for generating chimeras in which the cross-over points between different CsPT proteins occur within the membrane. FIG. 7B depicts an example of a “through membrane” approach for generating chimeras in which there is a single cross-over point between two helices. In the example shown in FIG. 7B, the cross-over point is between helices 6&7 of the CsPT protein.

[0048] FIG. 8 is a schematic showing a plasmid bearing the transcriptional unit encoding each PT. The coding sequence for the PT enzymes (labeled “Library gene”) was driven by the GAL1 promoter. The plasmid contains markers for both yeast (URA3) and bacteria (ampR), as well as origins of replication for yeast (2 micron), and bacteria (pBR322).

[0049] FIGS. 9A-9B depict graphs showing secondary screening activity data of PT enzymes, including point mutations, chimeric PTs, and PT fusion proteins based on an in vivo activity assay in S. cerevisiae described in Example 2. FIG. 9A depicts results for CBGA production and FIG. 9B depicts results for CBGVA production. Strain t444508, expressing a truncated CsPT4 protein (SEQ ID NO: 5), was used as a positive control and for determining hit ranking of the library members. Strain t444525, expressing GFP, was used as a negative control. The data represent the average of four bioreplicates±one standard deviation of the mean. Strain IDs and their corresponding activity from these graphs are shown in Table 5.

[0050] FIGS. 10A-10B depict graphs showing secondary screening activity data of PT fusion proteins based on an in vivo activity assay in S. cerevisiae described in Example 2. FIG. 10A depicts results for CBGA production, and FIG. 10B depicts results for CBGVA production. The data represent the average of four bioreplicates±one standard deviation of the mean. Strain IDs and their corresponding activity from these graphs are shown in Table 5.

[0051] FIGS. 11A-11B depict graphs showing secondary screening activity data of chimeric PTs based on an in vivo activity assay in S. cerevisiae described in Example 2. FIG. 11A depicts results for CBGA production, and FIG. 11B depicts results for CBGVA production. Strain IDs and their corresponding activity from these graphs are shown in Table 5.

[0052] FIGS. 12A-12B depict graphs showing activity data from a second-generation library of chimeric PTs and chimeric fusion proteins (Gen 2 library) based on an in vivo activity assay in S. cerevisiae described in Examples 3-4. Strain t612212, expressing a truncated CsPT4 protein (SEQ ID NO: 5), was used as a positive control and for determining hit ranking of the library members. FIG. 12A depicts results for CBGA production in the presence of 1 mM olivetolic acid (OA), and FIG. 12B depicts results for CBGVA production in the presence of 1 mM divaric acid (DA). Strain IDs and their corresponding activity from these graphs are shown in Table 7.

[0053] FIG. 13 depicts a graph showing activity data from a third-generation library of chimeric fusion proteins (Gen3 PT library) for CBGA production based on an in vivo activity assay in S. cerevisiae described in Example 5. Strain t704346, which comprises an ERG20ww-CsPT chimera identified in Example 4, was used as a benchmark for determining hit ranking of the library members. Strain IDs and their corresponding activity from this graph are shown in Table 8.

[0054] FIG. 14 depicts a graph showing library screening activity data of chimeric fusions including ERG20 homologs based on an in vivo activity assay for CBGA production in S. cerevisiae described in Example 6. Strains t756346 and t56349 were used as positive controls. Strain IDs and their corresponding activity from this graph are shown in Table 9.

[0055] FIGS. 15A-15B depict graphs showing activity data from a fourth-generation library of chimeric PTs (Gen 4 library) based on an in vivo activity assay in S. cerevisiae described in Example 7. The Gen4 library contained chimeric PTs from strains t523834 (SEQ ID NO: 114, corresponding to a CsPT1-CsPT4 chimera) and t524816 (SEQ ID NO: 116, corresponding to a CsPT4-CsPT7 chimera), described in Examples 1 and 2, which were modified to include point mutations characterized in Example 1. FIG. 15A depicts results for CBGA production and FIG. 15B depicts results for CBGVA production. Strain t827885, expressing a chimeric PT corresponding to SEQ ID NO: 324, was used as a positive control and for determining hit ranking of the library members. Strain t819232, expressing RFP, was used as a negative control. The data represent the average of four bioreplicates±one standard deviation of the mean. Strain IDs and their corresponding activity from these graphs are shown in Table 11.

[0056] FIG. 16 depicts a graph showing activity data from a fifth-generation library of chimeric PTs (Gen 5 library) based on an in vivo activity assay in S. cerevisiae described in Example 8. The Gen 5 library contained chimeric PTs from the Gen 4 library described in Example 7 that were modified to include additional point mutations. Strain t819140, expressing RFP, was used as a negative control. Strains t818980 and t819132 were used as positive controls. Strain IDs and their corresponding activity from this graph are shown in Table 12.

### DETAILED DESCRIPTION

[0057] This disclosure provides methods for production of cannabinoids and cannabinoid precursors from fatty acid substrates using genetically modified host cells. Methods include heterologous expression of a prenyltransferase (PT). The application describes the identification of multiple PTs that can be functionally expressed in host cells such as S. cerevisiae cells. As demonstrated in Examples 1-8, synthetic chimeric PTs were generated that contain portions of different C. sativa PT proteins. Surprisingly, chimeric PTs, and fusion proteins including chimeric PTs, were identified that were capable of producing more cannabigerolic acid (CBGA) and/or cannabigerovarinic acid (CBGVA) than CsPT4.

### Definitions

[0058] While the following terms are believed to be well understood by one of ordinary skill in the art, the following definitions are set forth to facilitate explanation of the disclosed subject matter.

[0059] The term “a” or “an” refers to one or more of an entity, i.e., can identify a referent as plural. Thus, the terms “a” or “an,” “one or more” and “at least one” are used interchangeably in this application. In addition, reference to “an element” by the indefinite article “a” or “an” does not exclude the possibility that more than one of the elements is present, unless the context clearly requires that there is one and only one of the elements.

[0060] The terms “microorganism” or “microbe” should be taken broadly. These terms are used interchangeably and include, but are not limited to, the two prokaryotic domains, Bacteria and Archaea, as well as certain eukaryotic fungi and protists. In some embodiments, the disclosure may refer to the “microorganisms” or “microbes” of lists/tables and figures present in the disclosure. This characterization can refer to not only the identified taxonomic genera of the tables and figures, but also the identified taxonomic species, as well as the various novel and newly identified or designed strains of any organism in the tables or figures. The same characterization holds true for the recitation of these terms in other parts of the specification, such as in the Examples.

[0061] The term “prokaryotes” is recognized in the art and refers to cells that contain no nucleus or other cell organelles. The prokaryotes are generally classified in one of two domains, the Bacteria and the Archaea.

[0062] “Bacteria” or “eubacteria” refers to a domain of prokaryotic organisms. Bacteria include at least 11 distinct groups as follows: (1) Gram-positive (gram+) bacteria, of which there are two major subdivisions: (a) high G+C group (Actinomycetes, Mycobacteria, Micrococcus, others) and (b) low G+C group (Bacillus, Clostridia, Lactobacillus, Staphylococci, Streptococci, Mycoplasmas); (2) Proteobacteria, e.g., Purple photosynthetic+non-photosynthetic Gram-negative bacteria (includes most “common” Gram-negative bacteria); (3) Cyanobacteria, e.g., oxygenic phototrophs; (4) Spirochetes and related species; (5) Planctomyces; (6) Bacteroides, Flavobacteria; (7) Chlamydia; (8) Green sulfur bacteria; (9) Green non-sulfur bacteria (also anaerobic phototrophs); (10) Radioresistant micrococci and relatives; and (11) Thermotoga and Thermosipho thermophiles.

[0063] The term “Archaea” refers to a taxonomic classification of prokaryotic organisms with certain properties that make them distinct from Bacteria in physiology and phylogeny.

[0064] The term “Cannabis” refers to a genus in the family Cannabaceae. Cannabis is a dioecious plant. Glandular structures located on female flowers of Cannabis, called trichomes, accumulate relatively high amounts of a class of terpeno-phenolic compounds known as phytocannabinoids (described in further detail below). Cannabis has conventionally been cultivated for production of fibre and seed (commonly referred to as “hemp-type”), or for production of intoxicants (commonly referred to as “drug-type”). In drug-type Cannabis, the trichomes contain relatively high amounts of tetrahydrocannabinolic acid (THCA), which can convert to tetrahydrocannabinol (THC) via a decarboxylation reaction, for example upon combustion of dried Cannabis flowers, to provide an intoxicating effect. Drug-type Cannabis often contains other cannabinoids in lesser amounts. In contrast, hemp-type Cannabis contains relatively low concentrations of THCA, often less than 0.3% THC by dry weight. Hemp-type Cannabis may contain non-THC and non-THCA cannabinoids, such as cannabidiolic acid (CBDA), cannabidiol (CBD), and other cannabinoids. Presently, there is a lack of consensus regarding the taxonomic organization of the species within the genus. Unless context dictates otherwise, the term “Cannabis” is intended to include all putative species within the genus, such as, without limitation, Cannabis sativa, Cannabis indica, and Cannabis ruderalis and without regard to whether the Cannabis is hemp-type or drug-type.

[0065] The term “cyclase activity” in reference to a polyketide synthase (PKS) enzyme (e.g., an olivetol synthase (OLS) enzyme) or a polyketide cyclase (PKC) enzyme (e.g., an olivetolic acid cyclase (OAC) enzyme), refers to the activity of catalyzing the cyclization of an oxo fatty acyl-CoA (e.g., 3,5,7-trioxododecanoyl-COA, 3,5,7-trioxodecanoyl-COA) to the corresponding intramolecular cyclization product (e.g., olivetolic acid, divarinic acid). In some embodiments, the PKS or PKC catalyzes the C2-C7 aldol condensation of an acyl-COA with three additional ketide moieties added thereto.

[0066] A “cytosolic” or “soluble” enzyme refers to an enzyme that is predominantly localized (or predicted to be localized) in the cytosol of a host cell.

[0067] A “eukaryote” is any organism whose cells contain a nucleus and other organelles enclosed within membranes. Eukaryotes belong to the taxon Eukarya or Eukaryota. The defining feature that sets eukaryotic cells apart from prokaryotic cells (i.e., bacteria and archaea) is that they have membrane-bound organelles, especially the nucleus, which contains the genetic material, and is enclosed by the nuclear envelope.

[0068] The term “host cell” refers to a cell that can be used to express a polynucleotide, such as a polynucleotide that encodes an enzyme used in biosynthesis of cannabinoids or cannabinoid precursors. The terms “genetically modified host cell,” “recombinant host cell,” and “recombinant strain” are used interchangeably and refer to host cells that have been genetically modified by, e.g., cloning and transformation methods, or by other methods known in the art (e.g., selective editing methods, such as CRISPR). Thus, the terms include a host cell (e.g., bacterial cell, yeast cell, fungal cell, insect cell, plant cell, mammalian cell, human cell, etc.) that has been genetically altered, modified, or engineered, so that it exhibits an altered, modified, or different genotype and/or phenotype, as compared to the naturally-occurring cell from which it was derived. It is understood that in some embodiments, the terms refer not only to the particular recombinant host cell in question, but also to the progeny or potential progeny of such a host cell.

[0069] The term “control host cell,” or the term “control” when used in relation to a host cell, refers to an appropriate comparator host cell for determining the effect of a genetic modification or experimental treatment. In some embodiments, the control host cell is a wild type cell. In other embodiments, a control host cell is genetically identical to the genetically modified host cell, except for the genetic modification(s) differentiating the genetically modified or experimental treatment host cell. In some embodiments, the control host cell has been genetically modified to express a wild type or otherwise known variant of an enzyme being tested for activity in other test host cells.

[0070] The term “heterologous” with respect to a polynucleotide, such as a polynucleotide comprising a gene, is used interchangeably with the term “exogenous” and the term “recombinant” and refers to: a polynucleotide that has been artificially supplied to a biological system; a polynucleotide that has been modified within a biological system, or a polynucleotide whose expression or regulation has been manipulated within a biological system. A heterologous polynucleotide that is introduced into or expressed in a host cell may be a polynucleotide that comes from a different organism or species from the host cell, or may be a synthetic polynucleotide, or may be a polynucleotide that is also endogenously expressed in the same organism or species as the host cell. For example, a polynucleotide that is endogenously expressed in a host cell may be considered heterologous when it is situated non-naturally in the host cell; expressed recombinantly in the host cell, either stably or transiently; modified within the host cell; selectively edited within the host cell; expressed in a copy number that differs from the naturally occurring copy number within the host cell; or expressed in a non-natural way within the host cell, such as by manipulating regulatory regions that control expression of the polynucleotide. In some embodiments, a heterologous polynucleotide is a polynucleotide that is endogenously expressed in a host cell but whose expression is driven by a promoter that does not naturally regulate expression of the polynucleotide. In other embodiments, a heterologous polynucleotide is a polynucleotide that is endogenously expressed in a host cell and whose expression is driven by a promoter that does naturally regulate expression of the polynucleotide, but the promoter or another regulatory region is modified. In some embodiments, the promoter is recombinantly activated or repressed. For example, gene-editing based techniques may be used to regulate expression of a polynucleotide, including an endogenous polynucleotide, from a promoter, including an endogenous promoter. See, e.g., Chavez el al., Nat Methods. 2016 July; 13(7): 563-567. A heterologous polynucleotide may comprise a wild-type sequence or a mutant sequence as compared with a reference polynucleotide sequence.

[0071] The term “at least a portion” or “at least a fragment” of a nucleic acid or polypeptide means a portion having the minimal size characteristics of such sequences, or any larger fragment of the full length molecule, up to and including the full length molecule. A fragment of a polynucleotide of the disclosure may encode a biologically active portion of an enzyme, such as a catalytic domain. A biologically active portion of a genetic regulatory element may comprise a portion or fragment of a full length genetic regulatory element and have the same type of activity as the full length genetic regulatory element, although the level of activity of the biologically active portion of the genetic regulatory element may vary compared to the level of activity of the full length genetic regulatory element.

[0072] A coding sequence and a regulatory sequence are said to be “operably joined” or “operably linked” when the coding sequence and the regulatory sequence are covalently linked and the expression or transcription of the coding sequence is under the influence or control of the regulatory sequence. If the coding sequence is to be translated into a functional protein, the coding sequence and the regulatory sequence are said to be operably joined if induction of a promoter in the 5′ regulatory sequence promotes transcription of the coding sequence and if the nature of the linkage between the coding sequence and the regulatory sequence does not (1) result in the introduction of a frame-shift mutation, (2) interfere with the ability of the promoter region to direct the transcription of the coding sequence, or (3) interfere with the ability of the corresponding RNA transcript to be translated into a protein.

[0073] The terms “link,” “linked,” or ‘linkage’ means two entities (e.g., two polynucleotides or two proteins) are bound to one another by any physicochemical means. Any linkage known to those of ordinary skill in the art, covalent or non-covalent, is embraced. In some embodiments, a nucleic acid sequence encoding an enzyme of the disclosure is linked to a nucleic acid encoding a signal peptide. In some embodiments, an enzyme of the disclosure is linked to a signal peptide. Linkage can be direct or indirect.

[0074] The terms “transformed” or “transform” with respect to a host cell refer to a host cell in which one or more nucleic acids have been introduced, for example on a plasmid or vector or by integration into the genome. In some instances where one or more nucleic acids are introduced into a host cell on a plasmid or vector, one or more of the nucleic acids, or fragments thereof, may be retained in the cell, such as by integration into the genome of the cell, while the plasmid or vector itself may be removed from the cell. In such instances, the host cell is considered to be transformed with the nucleic acids that were introduced into the cell regardless of whether the plasmid or vector is retained in the cell or not.

[0075] The term “volumetric productivity” or “production rate” refers to the amount of product formed per volume of medium per unit of time. Volumetric productivity can be reported in gram per liter per hour (g/L/h).

[0076] The term “specific productivity” of a product refers to the rate of formation of the product normalized by unit volume or mass or biomass and has the physical dimension of a quantity of substance per unit time per unit mass or volume [M·T⁻¹·M⁻¹ or M·T⁻¹·L⁻³, where M is mass or moles, T is time, L is length].

[0077] The term “biomass specific productivity” refers to the specific productivity in gram product per gram of cell dry weight (CDW) per hour (g/g CDW/h) or in mmol of product per gram of cell dry weight (CDW) per hour (mmol/g CDW/h). Using the relation of CDW to OD600 for the given microorganism, specific productivity can also be expressed as gram product per liter culture medium per optical density of the culture broth at 600 nm (OD) per hour (g/L/h/OD). Also, if the elemental composition of the biomass is known, biomass specific productivity can be expressed in mmol of product per C-mole (carbon mole) of biomass per hour (mmol/C-mol/h).

[0078] The term “yield” refers to the amount of product obtained per unit weight of a certain substrate and may be expressed as g product per g substrate (g/g) or moles of product per mole of substrate (mol/mol). Yield may also be expressed as a percentage of the theoretical yield. “Theoretical yield” is defined as the maximum amount of product that can be generated per a given amount of substrate as dictated by the stoichiometry of the metabolic pathway used to make the product and may be expressed as g product per g substrate (g/g) or moles of product per mole of substrate (mol/mol).

[0079] The term “titer” refers to the strength of a solution or the concentration of a substance in solution. For example, the titer of a product of interest (e.g., small molecule, peptide, synthetic compound, fuel, alcohol, etc.) in a fermentation broth is described as g of product of interest in solution per liter of fermentation broth or cell-free broth (g/L) or as g of product of interest in solution per kg of fermentation broth or cell-free broth (g/Kg).

[0080] The term “total titer” refers to the sum of all products of interest produced in a process, including but not limited to the products of interest in solution, the products of interest in gas phase if applicable, and any products of interest removed from the process and recovered relative to the initial volume in the process or the operating volume in the process. For example, the total titer of products of interest (e.g., small molecule, peptide, synthetic compound, fuel, alcohol, etc.) in a fermentation broth is described as g of products of interest in solution per liter of fermentation broth or cell-free broth (g/L) or as g of products of interest in solution per kg of fermentation broth or cell-free broth (g/Kg).

[0081] The term “amino acid” refers to organic compounds that comprise an amino group, —NH2, and a carboxyl group, —COOH. The term “amino acid” includes both naturally occurring and unnatural amino acids. Nomenclature for the twenty common amino acids is as follows: alanine (ala or A); arginine (arg or R); asparagine (asn or N); aspartic acid (asp or D); cysteine (cys or C); glutamine (gln or Q); glutamic acid (glu or E); glycine (gly or G); histidine (his or H); isoleucine (ile or I); leucine (leu or L); lysine (lys or K); methionine (met or M); phenylalanine (phe or F); proline (pro or P); serine (ser or S); threonine (thr or T); tryptophan (trp or W); tyrosine (tyr or Y); and valine (val or V). Non-limiting examples of unnatural amino acids include homo-amino acids, proline and pyruvic acid derivatives, 3-substituted alanine derivatives, glycine derivatives, ring-substituted phenylalanine derivatives, ring-substituted tyrosine derivatives, linear core amino acids, amino acids with protecting groups including Fmoc, Boc, and Cbz, β-amino acids (β3 and β2), and N-methyl amino acids.

[0082] The term “aliphatic” refers to alkyl, alkenyl, alkynyl, and carbocyclic groups. Likewise, the term “heteroaliphatic” refers to heteroalkyl, heteroalkenyl, heteroalkynyl, and heterocyclic groups.

[0083] The term “alkyl” refers to a radical of, or a substituent that is, a straight-chain or branched saturated hydrocarbon group having from 1 to 20 carbon atoms (“C₁₋₂₀ alkyl”). In certain embodiments, the term “alkyl” refers to a radical of, or a substituent that is, a straight-chain or branched saturated hydrocarbon group having from 1 to 10 carbon atoms (“C₁₋₁₀ alkyl”). In some embodiments, an alkyl group has 1 to 9 carbon atoms (“C₁₋₉ alkyl”). In some embodiments, an alkyl group has 1 to 8 carbon atoms (“C₁₋₈ alkyl”). In some embodiments, an alkyl group has 1 to 7 carbon atoms (“C₁₋₇ alkyl”). In some embodiments, an alkyl group has 2 to 7 carbon atoms (“C₂₋₇alkyl”). In some embodiments, an alkyl group has 3 to 7 carbon atoms (“C₃₋₇ alkyl”). In some embodiments, an alkyl group has 1 to 6 carbon atoms (“C₁₋₆ alkyl”). In some embodiments, an alkyl group has 2 to 6 carbon atoms (“C₂₋₆ alkyl”). In some embodiments, an alkyl group has 3 to 5 carbon atoms (“C₃₋₅ alkyl”). In some embodiments, an alkyl group has 5 carbon atoms (“C₅ alkyl”). In some embodiments, the alkyl group has 3 carbon atoms (“C₃ alkyl”). In some embodiments, the alkyl group has 7 carbon atoms (“C₇ alkyl”). In some embodiments, an alkyl group has 1 to 5 carbon atoms (“C₁₋₅ alkyl”). In some embodiments, an alkyl group has 1 to 4 carbon atoms (“C₁₋₄ alkyl”). In some embodiments, an alkyl group has 1 to 3 carbon atoms (“C₁₋₃ alkyl”). In some embodiments, an alkyl group has 1 to 2 carbon atoms (“C₁₋₂ alkyl”). In some embodiments, an alkyl group has 1 carbon atom (“C₁ alkyl”).

[0084] Examples of C₁₋₆ alkyl groups include methyl (C₁), ethyl (C₂), propyl (C₃) (e.g., n-propyl, isopropyl), butyl (C₄) (e.g., n-butyl, tert-butyl, sec-butyl, iso-butyl), pentyl (C₅) (e.g., n-pentyl, 3-pentanyl, amyl, neopentyl, 3-methyl-2-butanyl, tertiary amyl), and hexyl (C₆) (e.g., n-hexyl). Additional examples of alkyl groups include n-heptyl (C₇), n-octyl (C₈), and the like. Unless otherwise specified, each instance of an alkyl group is independently unsubstituted (an “unsubstituted alkyl”) or substituted (a “substituted alkyl”) with one or more substituents (e.g., halogen, such as F). In certain embodiments, the alkyl group is an unsubstituted C₁₋₁₀ alkyl (such as unsubstituted C₁₋₆ alkyl, e.g., —CH₃ (Me), unsubstituted ethyl (Et), unsubstituted propyl (Pr, e.g., unsubstituted n-propyl (n-Pr), unsubstituted isopropyl (i-Pr)), unsubstituted butyl (Bu, e.g., unsubstituted n-butyl (n-Bu), unsubstituted tert-butyl (tert-Bu or t-Bu), unsubstituted sec-butyl (sec-Bu), unsubstituted isobutyl (i-Bu)). In certain embodiments, the alkyl group is a substituted C₁₋₁₀ alkyl (such as substituted C₁₋₆ alkyl, e.g., —CF₃, benzyl).

[0085] The term “acyl” refers to a group having the general formula —C(═O)R^{X1}, —C(═O)OR^{X1}, —C(═O)—O—C(═O)R^{X1}, —C(═O)SR^{X1}, —C(═O)N(R^{X1})₂, —C(═S)R^{X1}, —C(═S)N(R^{X1})₂, and —C(═S)S(R^{X1}), —C(═NR^{X1})R^{X1}, —C(═NR^{X1})OR^{X1}, —C(═NR^{X1})SR^{X1}, and —C(═NR^{X1})N(R^{X1})₂, wherein R^{X1} is hydrogen; halogen; substituted or unsubstituted hydroxyl; substituted or unsubstituted thiol; substituted or unsubstituted amino; substituted or unsubstituted acyl, cyclic or acyclic, substituted or unsubstituted, branched or unbranched aliphatic; cyclic or acyclic, substituted or unsubstituted, branched or unbranched heteroaliphatic; cyclic or acyclic, substituted or unsubstituted, branched or unbranched alkyl; cyclic or acyclic, substituted or unsubstituted, branched or unbranched alkenyl; substituted or unsubstituted alkynyl; substituted or unsubstituted aryl, substituted or unsubstituted heteroaryl, aliphaticoxy, heteroaliphaticoxy, alkyloxy, heteroalkyloxy, aryloxy, heteroaryloxy, aliphaticthioxy, heteroaliphaticthioxy, alkylthioxy, heteroalkylthioxy, arylthioxy, heteroarylthioxy, mono- or di-aliphaticamino, mono- or di-heteroaliphaticamino, mono- or di-alkylamino, mono- or di-heteroalkylamino, mono- or di-arylamino, or mono- or di-heteroarylamino; or two R^{X1} groups taken together form a 5- to 6-membered heterocyclic ring. Exemplary acyl groups include aldehydes (—CHO), carboxylic acids (—CO₂H), ketones, acyl halides, esters, amides, imines, carbonates, carbamates, and ureas. Acyl substituents include, but are not limited to, any of the substituents described in this application that result in the formation of a stable moiety (e.g., aliphatic, alkyl, alkenyl, alkynyl, heteroaliphatic, heterocyclic, aryl, heteroaryl, acyl, oxo, imino, thiooxo, cyano, isocyano, amino, azido, nitro, hydroxyl, thiol, halo, aliphaticamino, heteroaliphaticamino, alkylamino, heteroalkylamino, arylamino, heteroarylamino, alkylaryl, arylalkyl, aliphaticoxy, heteroaliphaticoxy, alkyloxy, heteroalkyloxy, aryloxy, heteroaryloxy, aliphaticthioxy, heteroaliphaticthioxy, alkylthioxy, heteroalkylthioxy, arylthioxy, heteroarylthioxy, acyloxy, and the like, each of which may or may not be further substituted).

[0086] “Alkenyl” refers to a radical of, or a substituent that is, a straight-chain or branched hydrocarbon group having from 2 to 20 carbon atoms, one or more carbon-carbon double bonds, and no triple bonds (“C₂₋₂₀ alkenyl”). In some embodiments, an alkenyl group has 2 to 10 carbon atoms (“C₂₋₁₀ alkenyl”). In some embodiments, an alkenyl group has 2 to 9 carbon atoms (“C₂₋₉ alkenyl”). In some embodiments, an alkenyl group has 2 to 8 carbon atoms (“C₂₋₈ alkenyl”). In some embodiments, an alkenyl group has 2 to 7 carbon atoms (“C₂₋₇ alkenyl”). In some embodiments, an alkenyl group has 2 to 6 carbon atoms (“C₂₋₆ alkenyl”). In some embodiments, an alkenyl group has 2 to 5 carbon atoms (“C₂₋₅ alkenyl”). In some embodiments, an alkenyl group has 2 to 4 carbon atoms (“C₂₋₄ alkenyl”). In some embodiments, an alkenyl group has 2 to 3 carbon atoms (“C₂₋₃ alkenyl”). In some embodiments, an alkenyl group has 2 carbon atoms (“C₂ alkenyl”). The one or more carbon-carbon double bonds can be internal (such as in 2-butenyl) or terminal (such as in 1-butenyl). Examples of C₂₋₄ alkenyl groups include ethenyl (C₂), 1-propenyl (C₃), 2-propenyl (C₃), 1-butenyl (C₄), 2-butenyl (C₄), butadienyl (C₄), and the like. Examples of C₂₋₆ alkenyl groups include the aforementioned C₂₋₄ alkenyl groups as well as pentenyl (C₅), pentadienyl (C₅), hexenyl (C₆), and the like. Additional examples of alkenyl include heptenyl (C₇), octenyl (C₈), octatrienyl (C₈), and the like. Unless otherwise specified, each instance of an alkenyl group is independently optionally substituted, i.e., unsubstituted (an “unsubstituted alkenyl”) or substituted (a “substituted alkenyl”) with one or more substituents. In certain embodiments, the alkenyl group is unsubstituted C₂₋₁₀ alkenyl. In certain embodiments, the alkenyl group is substituted C₂₋₁₀ alkenyl.

[0087] “Alkynyl” refers to a radical of, or a substituent that is, a straight-chain or branched hydrocarbon group having from 2 to 20 carbon atoms, one or more carbon-carbon triple bonds, and optionally one or more double bonds (“C₂₋₂₀ alkynyl”). In some embodiments, an alkynyl group has 2 to 10 carbon atoms (“C₂₋₁₀ alkynyl”). In some embodiments, an alkynyl group has 2 to 9 carbon atoms (“C₂₋₉ alkynyl”). In some embodiments, an alkynyl group has 2 to 8 carbon atoms (“C₂₋₈ alkynyl”). In some embodiments, an alkynyl group has 2 to 7 carbon atoms (“C₂₋₇ alkynyl”). In some embodiments, an alkynyl group has 2 to 6 carbon atoms (“C₂₋₆ alkynyl”). In some embodiments, an alkynyl group has 2 to 5 carbon atoms (“C₂₋₅ alkynyl”). In some embodiments, an alkynyl group has 2 to 4 carbon atoms (“C₂₋₄ alkynyl”). In some embodiments, an alkynyl group has 2 to 3 carbon atoms (“C₂₋₃ alkynyl”). In some embodiments, an alkynyl group has 2 carbon atoms (“C₂ alkynyl”). The one or more carbon-carbon triple bonds can be internal (such as in 2-butynyl) or terminal (such as in 1-butynyl). Examples of C₂₋₄ alkynyl groups include, without limitation, ethynyl (C₂), 1-propynyl (C₃), 2-propynyl (C₃), 1-butynyl (C₄), 2-butynyl (C₄), and the like. Examples of C₂₋₆ alkenyl groups include the aforementioned C₂₋₄ alkynyl groups as well as pentynyl (C₅), hexynyl (C₆), and the like. Additional examples of alkynyl include heptynyl (C₇), octynyl (C₅), and the like. Unless otherwise specified, each instance of an alkynyl group is independently optionally substituted, i.e., unsubstituted (an “unsubstituted alkynyl”) or substituted (a “substituted alkynyl”) with one or more substituents. In certain embodiments, the alkynyl group is unsubstituted C₂₋₁₀ alkynyl. In certain embodiments, the alkynyl group is substituted C₂₋₁₀ alkynyl.

[0088] “Carbocyclyl” or “carbocyclic” refers to a radical of a non-aromatic cyclic hydrocarbon group having from 3 to 10 ring carbon atoms (“C₃₋₁₀ carbocyclyl”) and zero heteroatoms in the non-aromatic ring system. In some embodiments, a carbocyclyl group has 3 to 8 ring carbon atoms (“C₃₋₈ carbocyclyl”). In some embodiments, a carbocyclyl group has 3 to 6 ring carbon atoms (“C₃₋₆ carbocyclyl”). In some embodiments, a carbocyclyl group has 3 to 6 ring carbon atoms (“C₃₋₆ carbocyclyl”). In some embodiments, a carbocyclyl group has 5 to 10 ring carbon atoms (“C₅₋₁₀ carbocyclyl”). Exemplary C₃₋₆ carbocyclyl groups include, without limitation, cyclopropyl (C₃), cyclopropenyl (C₃), cyclobutyl (C₄), cyclobutenyl (C₄), cyclopentyl (C₅), cyclopentenyl (C₅), cyclohexyl (C₆), cyclohexenyl (C₆), cyclohexadienyl (C₆), and the like. Exemplary C₃₋₈ carbocyclyl groups include, without limitation, the aforementioned C₃₋₆ carbocyclyl groups as well as cycloheptyl (C₇), cycloheptenyl (C₇), cycloheptadienyl (C₇), cycloheptatrienyl (C₇), cyclooctyl (C₈), cyclooctenyl (C₈), bicyclo[2.2.1]heptanyl (C₇), bicyclo[2.2.2]octanyl (C₈), and the like. Exemplary C₃₋₁₀ carbocyclyl groups include, without limitation, the aforementioned C₃₋₈ carbocyclyl groups as well as cyclononyl (C₉), cyclononenyl (C₉), cyclodecyl (C₁₀), cyclodecenyl (C₁₀), octahydro-1H-indenyl (C₉), decahydronaphthalenyl (C₁₀), spiro[4.5]decanyl (C₁₀), and the like. As the foregoing examples illustrate, in certain embodiments, the carbocyclyl group is either monocyclic (“monocyclic carbocyclyl”) or contain a fused, bridged or spiro ring system such as a bicyclic system (“bicyclic carbocyclyl”) and can be saturated or can be partially unsaturated. “Carbocyclyl” also includes ring systems wherein the carbocyclic ring, as defined above, is fused with one or more aryl or heteroaryl groups wherein the point of attachment is on the carbocyclic ring, and in such instances, the number of carbons continue to designate the number of carbons in the carbocyclic ring system. Unless otherwise specified, each instance of a carbocyclyl group is independently optionally substituted, i.e., unsubstituted (an “unsubstituted carbocyclyl”) or substituted (a “substituted carbocyclyl”) with one or more substituents. In certain embodiments, the carbocyclyl group is unsubstituted C₃₋₁₀ carbocyclyl. In certain embodiments, the carbocyclyl group is a substituted C₃₋₁₀ carbocyclyl.

[0089] In some embodiments, “carbocyclyl” is a monocyclic, saturated carbocyclyl group having from 3 to 10 ring carbon atoms (“C₃₋₁₀ cycloalkyl”). In some embodiments, a cycloalkyl group has 3 to 8 ring carbon atoms (“C₃₋₈ cycloalkyl”). In some embodiments, a cycloalkyl group has 3 to 6 ring carbon atoms (“C₃₋₆ cycloalkyl”). In some embodiments, a cycloalkyl group has 5 to 6 ring carbon atoms (“C₅₋₆ cycloalkyl”). In some embodiments, a cycloalkyl group has 5 to 10 ring carbon atoms (“C₅₋₁₀ cycloalkyl”). Examples of C₅₋₆ cycloalkyl groups include cyclopentyl (C₅) and cyclohexyl (C₅). Examples of C₃₋₆ cycloalkyl groups include the aforementioned C₅₋₆ cycloalkyl groups as well as cyclopropyl (C₃) and cyclobutyl (C₄). Examples of C₃₋₈ cycloalkyl groups include the aforementioned C₃₋₆ cycloalkyl groups as well as cycloheptyl (C₇) and cyclooctyl (C₈). Unless otherwise specified, each instance of a cycloalkyl group is independently unsubstituted (an “unsubstituted cycloalkyl”) or substituted (a “substituted cycloalkyl”) with one or more substituents. In certain embodiments, the cycloalkyl group is unsubstituted C₃₋₁₀ cycloalkyl. In certain embodiments, the cycloalkyl group is substituted C₃₋₁₀ cycloalkyl.

[0090] “Aryl” refers to a radical of a monocyclic or polycyclic (e.g., bicyclic or tricyclic) 4n+2 aromatic ring system (e.g., having 6, 10, or 14 pi electrons shared in a cyclic array) having 6-14 ring carbon atoms and zero heteroatoms provided in the aromatic ring system (“C₆₋₁₄ aryl”). In some embodiments, an aryl group has six ring carbon atoms (“C₆ aryl”; e.g., phenyl). In some embodiments, an aryl group has ten ring carbon atoms (“C₁₀ aryl”; e.g., naphthyl such as 1-naphthyl and 2-naphthyl). In some embodiments, an aryl group has fourteen ring carbon atoms (“C₁₄ aryl”; e.g., anthracyl). “Aryl” also includes ring systems wherein the aryl ring, as defined above, is fused with one or more carbocyclyl or heterocyclyl groups wherein the radical or point of attachment is on the aryl ring, and in such instances, the number of carbon atoms continue to designate the number of carbon atoms in the aryl ring system. Unless otherwise specified, each instance of an aryl group is independently optionally substituted, i.e., unsubstituted (an “unsubstituted aryl”) or substituted (a “substituted aryl”) with one or more substituents. In certain embodiments, the aryl group is unsubstituted C₆₋₁₄ aryl. In certain embodiments, the aryl group is substituted C₆₋₁₄ aryl.

[0091] “Aralkyl” is a subset of alkyl and aryl and refers to an optionally substituted alkyl group substituted by an optionally substituted aryl group. In certain embodiments, the aralkyl is optionally substituted benzyl. In certain embodiments, the aralkyl is benzyl. In certain embodiments, the aralkyl is optionally substituted phenethyl. In certain embodiments, the aralkyl is phenethyl. In certain embodiments, the aralkyl is 7-phenylheptanyl. In certain embodiments, the aralkyl is C7 alkyl substituted by an optionally substituted aryl group (e.g., phenyl). In certain embodiments, the aralkyl is a C7-C10 alkyl group substituted by an optionally substituted aryl group (e.g., phenyl).

[0092] “Partially unsaturated” refers to a group that includes at least one double or triple bond. A “partially unsaturated” ring system is further intended to encompass rings having multiple sites of unsaturation but is not intended to include aromatic groups (e.g., aryl or heteroaryl groups) as defined in this application. Likewise. “saturated” refers to a group that does not contain a double or triple bond, i.e., contains all single bonds.

[0093] The term “optionally substituted” means substituted or unsubstituted.

[0094] Alkyl, alkenyl, alkynyl, carbocyclyl, heterocyclyl, aryl, and heteroaryl groups are optionally substituted (e.g., “substituted” or “unsubstituted” alkyl, “substituted” or “unsubstituted” alkenyl, “substituted” or “unsubstituted” alkynyl, “substituted” or “unsubstituted” carbocyclyl, “substituted” or “unsubstituted” heterocyclyl, “substituted” or “unsubstituted” aryl or “substituted” or “unsubstituted” heteroaryl group). In general, the term “substituted,” whether preceded by the term “optionally” or not, means that at least one hydrogen present on a group (e.g., a carbon or nitrogen atom) is replaced with a permissible substituent, e.g., a substituent which upon substitution results in a stable compound, e.g., a compound which does not spontaneously undergo transformation such as by rearrangement, cyclization, elimination, or other reaction. Unless otherwise indicated, a “substituted” group has a substituent at one or more substitutable positions of the group, and when more than one position in any given structure is substituted, the substituent is either the same or different at each position. The term “substituted” is contemplated to include substitution with all permissible substituents of organic compounds, any of the substituents described in this application that results in the formation of a stable compound. The present invention contemplates any and all such combinations in order to arrive at a stable compound. For purposes of this invention, heteroatoms such as nitrogen may have hydrogen substituents and/or any suitable substituent as described in this application which satisfy the valencies of the heteroatoms and results in the formation of a stable moiety.

[0095] Exemplary carbon atom substituents include, but are not limited to, halogen, —CN, —NO₂, —N₃, —SO₂H, —SO₃H, —OH, —OR^{aa}, —ON(R^{bb})₂, —N(R^{bb})₂, —N(R^{bb})₃⁺X⁻, —N(OR^{cc})R^{bb}, —SH, —SR^{aa}, —SSR^{cc}, —C(═O)R^{aa}, —CO₂H, —CHO, —C(OR^{cc})₂, —CO₂R^{aa}, —OC(═O)R^{aa}, —CO₂R^{aa}, —C(═O)N(R^{bb})₂, —OC(═O)N(R^{bb})₂, —NR^{bb}C(═O)R^{aa}, —NR^{bb}CO₂R^{aa}, —NR^{bb}C(═O)N(R^{bb})₂, —C(═NR^{bb})R^{aa}, —C(═NR^{bb})OR^{aa}, —OC(═NR^{bb})R^{aa}, —OC(═NR^{bb})OR^{aa}, —C(═NR^{bb})N(R^{bb})₂, —OC(═NR^{bb})N(R^{bb})₂, —NR^{bb}C(═NR^{bb})N(R^{bb})₂, —C(═O)NR^{bb}SO₂R^{aa}, —NR^{bb}SO₂R^{aa}, —SO₂N(R^{bb})₂, —SO₂R^{aa}, —SO₂OR^{aa}, —OSO₂R^{aa}, —S(═O)R^{aa}, —OS(═O)R^{aa}, —Si(R^{aa})₃, —OSi(R^{aa})₃ —C(═S)N(R^{bb})₂, —C(═O)SR^{aa}, —C(═S)SR^{aa}, —SC(═S)SR^{aa}, —SC(═O)SR^{aa}, —OC(═O)SR^{aa}, —SC(═O)OR^{aa}, —SC(═O)R^{aa}, —P(═O)(R^{aa})₂, —P(═O)(OR^{cc})₂, —OP(═O)(R^{aa})₂, —OP(═O)(OR^{cc})₂, —P(═O)(N(R^{bb})₂)₂, —OP(═O)(N(R^{bb})₂)₂, —NR^{bb}P(═O)(R^{aa})₂, —NR^{bb}P(═O)(OR^{cc})₂, —NR^{bb}P(═O)(N(R^{bb})₂)₂, —P(R^{cc})₂, —P(OR^{cc})₂, —P(R^{cc})₃⁺X⁻, —P(OR^{cc})₃⁺X⁻, —P(R^{cc})₄, —P(OR^{cc})₄, —OP(R^{cc})₂, —OP(R^{cc})₃⁺X⁻, —OP(OR^{cc})₂, —OP(OR^{cc})₃⁺X⁻, —OP(R^{cc})₄, —OP(OR^{cc})₄, —B(R^{aa})₂, —B(OR^{cc})₂, —BR^{aa}(OR^{cc}), C₁₋₁₀ alkyl, C₁₋₁₀ perhaloalkyl, C₂₋₁₀ alkenyl, C₂₋₁₀ alkynyl, heteroC₁₋₁₀ alkyl, heteroC₂₋₁₀ alkenyl, heteroC₂₋₁₀ alkynyl, C₃₋₁₀ carbocyclyl, 3-14 membered heterocyclyl, C₆₋₁₄ aryl, and 5-14 membered heteroaryl;
[0096] wherein:
   [0097] each instance of R^{aa} is, independently, selected from C¹⁻¹⁰ alkyl, C₁₋₁₀ perhaloalkyl, C₂₋₁₀ alkenyl, C₂₋₁₀ alkynyl, heteroC₁₋₁₀ alkyl, heteroC₂₋₁₀alkenyl, heteroC₂₋₁₀alkynyl, C₃₋₁₀ carbocyclyl, 3-14 membered heterocyclyl, C₆₋₁₄ aryl, and 5-14 membered heteroaryl, or two R^{aa} groups are joined to form a 3-14 membered heterocyclyl or 5-14 membered heteroaryl ring, wherein each alkyl, alkenyl, alkynyl, heteroalkyl, heteroalkenyl, heteroalkynyl, carbocyclyl, heterocyclyl, aryl, and heteroaryl is independently substituted with 0, 1, 2, 3, 4, or 5 R^{dd} groups;
   [0098] each instance of R^{bb} is, independently, selected from hydrogen, —OH, —OR^{aa}, —N(R^{cc})₂, —CN, —C(═O)R^{aa}, —C(═O)N(R^{cc})₂, —CO₂R^{aa}, —SO₂R^{aa}, —C(═NR^{cc})OR^{aa}, —C(═NR^{cc})N(R^{cc})₂, —SO₂N(R^{cc})₂, —SO₂R^{cc}, —SO₂OR^{cc}, —SOR^{aa}, —C(═S)N(R^{cc})₂, —C(═O)SR^{cc}, —C(═S)SR^{cc}, —P(═O)(R^{aa})₂, —P(═O)(OR^{cc})₂, —P(═O)(N(R^{cc})₂)₂, C₁₋₁₀ alkyl, C₁₋₁₀ perhaloalkyl, C₂₋₁₀ alkenyl, C₂₋₁₀ alkynyl, heteroC₁₋₁₀alkyl, heteroC₂₋₁₀alkenyl, heteroC₂₋₁₀alkynyl, C₃₋₁₀ carbocyclyl, 3-14 membered heterocyclyl, C₆₋₁₄ aryl, and 5-14 membered heteroaryl, or two R^{bb} groups are joined to form a 3-14 membered heterocyclyl or 5-14 membered heteroaryl ring, wherein each alkyl, alkenyl, alkynyl, heteroalkyl, heteroalkenyl, heteroalkynyl, carbocyclyl, heterocyclyl, aryl, and heteroaryl is independently substituted with 0, 1, 2, 3, 4, or 5 R^{dd} groups; wherein X⁻ is a counterion;
   [0099] each instance of R^{cc} is, independently, selected from hydrogen, C₁₋₁₀ alkyl, C₁₋₁₀ perhaloalkyl, C₂₋₁₀ alkenyl, C₂₋₁₀ alkynyl, heteroC₁₋₁₀ alkyl, heteroC₂₋₁₀ alkenyl, heteroC₂₋₁₀ alkynyl, C₃₋₁₀ carbocyclyl, 3-14 membered heterocyclyl, C₆₋₁₄ aryl, and 5-14 membered heteroaryl, or two R^{cc} groups are joined to form a 3-14 membered heterocyclyl or 5-14 membered heteroaryl ring, wherein each alkyl, alkenyl, alkynyl, heteroalkyl, heteroalkenyl, heteroalkynyl, carbocyclyl, heterocyclyl, aryl, and heteroaryl is independently substituted with 0, 1, 2, 3, 4, or 5 R^{dd} groups;
   [0100] each instance of R^{dd} is, independently, selected from halogen, —CN, —NO₂, —N₃, —SO₂H, —SO₃H, —OH, —OR^{ee}, —ON(R^{ff})₂, —N(R^{ff})₂, —N(R^{ff})₃⁺X⁻, —N(OR^{ee})R^{ff}, —SH, —SR^{ee}, —SSR^{ee}, —C(═O)R^{ee}, —CO₂H, —CO₂R^{ee}, —OC(═O)R^{ee}, —OCO₂R^{ee}, —C(═O)N(R^{ff})₂, —OC(═O)N(R^{ff})₂, —NR^{ff}C(═O)R^{ee}, —NR^{ff}CO₂R^{ee}, —NR^{ff}C(═O)N(R^{ff})₂, —C(═NR^{ff})OR^{ee}, —OC(═NR^{ff})R^{ee}, —OC(═NR^{ff})OR^{ee}, —C(═NR^{ff})N(R^{ff})₂, —OC(═NR^{ff})N(R^{ff})₂, —NR^{ff}C(═NR^{ff})N(R^{ff})₂, —NR^{ff}SO₂R^{ee}, —SO₂N(R^{ff})₂, —SO₂R^{ee}, —SO₂OR^{ee}, —OSO₂R^{ee}, —S(═O))R^{ee}, —Si(R^{ee})₃, —OSi(R^{ee})₃, —C(═S)N(R^{ff})₂, —C(═O)SR^{ee}, —C(═S)SR^{ee}, —SC(═S)SR^{ee}, —P(═O)(OR^{ee})₂, —P(═O)(R^{ee})₂, —OP(═O)(R^{ee})₂, —OP(═O)(OR^{ee})₂, C₁₋₆ alkyl, C₁₋₆ perhaloalkyl, C₂₋₆ alkenyl, C₂₋₆ alkynyl, heteroC₁₋₆alkyl, heteroC₂₋₆alkenyl, heteroC₂₋₆alkynyl, C₃₋₁₀ carbocyclyl, 3-10 membered heterocyclyl, C₆₋₁₀ aryl, 5-10 membered heteroaryl, wherein each alkyl, alkenyl, alkynyl, heteroalkyl, heteroalkenyl, heteroalkynyl, carbocyclyl, heterocyclyl, aryl, and heteroaryl is independently substituted with 0, 1, 2, 3, 4, or 5 R^{gg} groups, or two geminal R^{dd} substituents can be joined to form ═O or ═S; wherein X⁻ is a counterion;
   [0101] each instance of R^{dd} is, independently, selected from C₁₋₆ alkyl, C₁₋₆ perhaloalkyl, C₂₋₆ alkenyl, C₂₋₆ alkynyl, heteroC₁₋₆ alkyl, heteroC₂₋₆alkenyl, heteroC₂₋₆ alkynyl, C₃₋₁₀ carbocyclyl, C₆₋₁₀ aryl, 3-10 membered heterocyclyl, and 3-10 membered heteroaryl, wherein each alkyl, alkenyl, alkynyl, heteroalkyl, heteroalkenyl, heteroalkynyl, carbocyclyl, heterocyclyl, aryl, and heteroaryl is independently substituted with 0, 1, 2, 3, 4, or 5 R^{gg} groups;
   [0102] each instance of R^{ff} is, independently, selected from hydrogen, C₁₋₆ alkyl, C₁₋₆ perhaloalkyl, C₂₋₆ alkenyl, C₂₋₆ alkynyl, heteroC₁₋₆alkyl, heteroC₂₋₆alkenyl, heteroC₂₋₆alkynyl, C₃₋₁₀ carbocyclyl, 3-10 membered heterocyclyl, C₆₋₁₀ aryl and 5-10 membered heteroaryl, or two R^{ff} groups are joined to form a 3-10 membered heterocyclyl or 5-10 membered heteroaryl ring, wherein each alkyl, alkenyl, alkynyl, heteroalkyl, heteroalkenyl, heteroalkynyl, carbocyclyl, heterocyclyl, aryl, and heteroaryl is independently substituted with 0, 1, 2, 3, 4, or 5 R^{gg} groups; and
   [0103] each instance of R^{gg} is, independently, halogen, —CN, —NO₂, —N₃, —SO₂H, —SO₃H, —OH, —OC₁₋₆ alkyl, —ON(C₁₋₆ alkyl)₂, —N(C₁₋₆ alkyl)₂, —N(C₁₋₆ alkyl)₃⁺X⁻, —NH(C₁₋₆ alkyl)₂⁺X⁻, —NH₂(C₁₋₆ alkyl) ⁺X⁻, —NH₃⁺X⁻, —N(OC₁₋₆ alkyl)(C₁₋₆ alkyl), —N(OH)(C₁₋₆ alkyl), —NH(OH), —SH, —SC₁₋₆ alkyl, —SS(C₁₋₆ alkyl), —C(═O)(C₁₋₆ alkyl), —CO₂H, —CO₂(C₁₋₆ alkyl), —OC(═O)(C₁₋₆ alkyl), —OCO₂(C₁₋₆ alkyl), —C(═O)NH₂, —C(═O)N(C₁₋₆ alkyl)₂, —OC(═O)NH(C₁₋₆ alkyl), —NHC(═O)(C₁₋₆ alkyl), —N(C₁₋₆ alkyl)C(═O)(C₁₋₄ alkyl), —NHCO₂(C₁₋₆ alkyl), —NHC(═O)N(C₁₋₆ alkyl)₂, —NHC(═O)NH(C₁₋₆ alkyl), —NHC(═O)NH₂, —C(═NH)O(C₁₋₆ alkyl), —OC(═NH)(C₁₋₆ alkyl), —OC(═NH)OC₁₋₆ alkyl, —C(═NH)N(C₁₋₆ alkyl)₂, —C(═NH)NH(C₁₋₆ alkyl), —C(═NH)NH₂, —OC(═NH)N(C₁₋₆ alkyl)₂, —OC(NH)NH(C₁₋₆ alkyl), —OC(NH)NH₂, —NHC(NH)N(C₁₋₆ alkyl)₂, —NHC(═NH)NH₂, —NHSO₂(C₁₋₆ alkyl), —SO₂N(C₁₋₆ alkyl)₂, —SO₂NH(C₁₋₆ alkyl), —SO₂NH₂, —SO₂C₁₋₆ alkyl, —SO₂OC₁₋₆ alkyl, —OSO₂C₁₋₆ alkyl, —SOC₁₋₆ alkyl, —Si(C₁₋₆ alkyl)₃, —OSi(C₁₋₆ alkyl)₃ —C(═S)N(C₁₋₆ alkyl)₂, C(═S)NH(C₁₋₆ alkyl), C(═S)NH₂, —C(═O)S(C₁₋₆ alkyl), —C(═S)SC₁₋₆ alkyl, —SC(═S)SC₁₋₆ alkyl, —P(═OX(OC₁₋₆ alkyl)₂, —P(═O)(C₁₋₆ alkyl)₂, —OP(═O)(C₁₋₆ alkyl)₂, —OP(═O)(OC₁₋₆ alkyl)₂, C₁₋₆ alkyl, C₁₋₆ perhaloalkyl, C₂₋₆ alkenyl, C₂₋₆ alkynyl, heteroC₁₋₆alkyl, heteroC₂₋₆alkenyl, heteroC₂₋₆alkynyl, C₃₋₁₀ carbocyclyl, C₆₋₁₀ aryl, 3-10 membered heterocyclyl, 5-10 membered heteroaryl; or two geminal R^{gg} substituents can be joined to form ═O or ═S; wherein X⁻ is a counterion. Alternatively, two geminal hydrogens on a carbon atom are replaced with the group ═O, ═S, ═NN(R^{bb})₂, ═NNR^{bb}C(═O)R^{aa}, ═NNR^{bb}C(═O)OR^{aa}, ═NNR^{bb}S(═O)₂R^{aa}, ═NR^{bb}, or ═NOR^{cc}; wherein each alkyl, alkenyl, alkynyl, heteroalkyl, heteroalkenyl, heteroalkynyl, carbocyclyl, heterocyclyl, aryl, and heteroaryl is independently substituted with 0, 1, 2, 3, 4, or 5 R^{dd} groups; wherein X⁻ is a counterion;
[0104] wherein:
[0105] each instance of R^{aa} is, independently, selected from C₁₋₁₀ alkyl, C₁₋₁₀ perhaloalkyl, C₂₋₁₀ alkenyl, C₂₋₁₀ alkynyl, heteroC₁₋₁₀ alkyl, heteroC₂₋₁₀alkenyl, heteroC₂₋₁₀alkynyl, C₃₋₁₀ carbocyclyl, 3-14 membered heterocyclyl, C₆₋₁₄ aryl, and 5-14 membered heteroaryl, or two R^{aa} groups are joined to form a 3-14 membered heterocyclyl or 5-14 membered heteroaryl ring, wherein each alkyl, alkenyl, alkynyl, heteroalkyl, heteroalkenyl, heteroalkynyl, carbocyclyl, heterocyclyl, aryl, and heteroaryl is independently substituted with 0, 1, 2, 3, 4, or 5 R^{dd} groups;
[0106] each instance of R^{bb} is, independently, selected from hydrogen, —OH, —OR^{cc}, —N(R^{cc})₂, —CN, —C(═O)R^{aa}, —C(═O)N(R^{cc})₂, —CO₂R^{aa}, —SO₂R^{aa}, —C(═NR^{cc})OR^{aa}, —C(═NR^{cc})N(R^{cc})₂, —SO₂N(R^{cc})₂, —SO₂R^{cc}, —SO₂OR^{cc}, —SOR^{aa}, —C(═S)N(R^{cc})₂, —C(═O)SR^{cc}, —C(═S)SR^{cc}, —P(═O)(R^{aa})₂, —P(═O)(OR^{cc})₂, —P(═O)(N(R^{cc})₂)₂, C₁₋₁₀ alkyl, C₁₋₁₀ perhaloalkyl, C₂₋₁₀ alkenyl, C₂₋₁₀ alkynyl, heteroC₁₋₁₀alkyl, heteroC₂₋₁₀alkenyl, heteroC₂₋₁₀alkynyl, C₃₋₁₀ carbocyclyl, 3-14 membered heterocyclyl, C₆₋₁₄ aryl, and 5-14 membered heteroaryl, or two R^{bb} groups are joined to form a 3-14 membered heterocyclyl or 5-14 membered heteroaryl ring, wherein each alkyl, alkenyl, alkynyl, heteroalkyl, heteroalkenyl, heteroalkynyl, carbocyclyl, heterocyclyl, aryl, and heteroaryl is independently substituted with 0, 1, 2, 3, 4, or 5 R^{dd} groups; wherein X⁻ is a counterion:
[0107] each instance of R^{cc} is, independently, selected from hydrogen. C₁₋₁₀ alkyl, C₁₋₁₀ perhaloalkyl, C₂₋₁₀ alkenyl, C₂₋₁₀ alkynyl, heteroC₁₋₁₀ alkyl, heteroC₂₋₁₀ alkenyl, heteroC₂₋₁₀ alkynyl, C₃₋₁₀ carbocyclyl, 3-14 membered heterocyclyl, C₆₋₁₄ aryl, and 5-14 membered heteroaryl, or two R^{cc} groups are joined to form a 3-14 membered heterocyclyl or 5-14 membered heteroaryl ring, wherein each alkyl, alkenyl, alkynyl, heteroalkyl, heteroalkenyl, heteroalkynyl, carbocyclyl, heterocyclyl, aryl, and heteroaryl is independently substituted with 0, 1, 2, 3, 4, or 5 R^{dd} groups;
[0108] each instance of R^{dd} is, independently, selected from halogen, —CN, —NO₂, —N₃, —SO₂H, —SO₃H, —OH, —OR^{ee}, —ON(R^{ff})₂, —N(R^{ff})₂, —N(R^{ff})₃⁺X⁻, —N(OR^{ee})R^{ff}, —SH, —SR^{ee}, —SSR^{ee}, —C(═O)R^{ee}, —CO₂H, —CO₂R^{ee}, —OC(═O)R^{ee}, —OCO₂R^{ee}, —C(═O)N(R^{ff})₂, —OC(═O)N(R^{ff})₂, —NR^{ff}C(═O)R^{ee}, —NR^{ff}CO₂R^{ee}, —NR^{ff}C(═O)N(R^{ff})₂, —C(═NR^{ff})OR^{ee}, —OC(═NR^{ff})R^{ee}, —OC(═NR^{ff})OR^{ee}, —C(═NR^{ff})N(R^{ff})₂, —OC(═NR^{ff})N(R^{ff})₂, —NR^{ff}C(═NR^{ff})N(R^{ff})₂, —NR^{ff}SO₂R^{ee}, —SO₂N(R^{ff})₂, —SO₂R^{ee}, —SO₂OR^{ee}, —OSO₂R^{ee}, —S(═O)R^{ee}, —Si(R^{ee})₃, —OSi(R^{ee})₃, —C(═S)N(R^{ff})₂, —C(═O)SR^{ee}, —C(═S)SR^{ee}, —SC(═S)SR^{ee}, —P(═O)(OR^{ee})₂, —P(═O)(R^{ee})₂, —OP(═O)(R^{ee})₂, —OP(═O)(OR^{ee})₂, C₁₋₆ alkyl, C₁₋₆ perhaloalkyl, C₂₋₆ alkenyl, C₂₋₆ alkynyl, heteroC₁₋₆alkyl, heteroC₂₋₆alkenyl, heteroC₂₋₆alkynyl, C₃₋₁₀ carbocyclyl, 3-10 membered heterocyclyl, C₆₋₁₀ aryl, 5-10 membered heteroaryl, wherein each alkyl, alkenyl, alkynyl, heteroalkyl, heteroalkenyl, heteroalkynyl, carbocyclyl, heterocyclyl, aryl, and heteroaryl is independently substituted with 0, 1, 2, 3, 4, or 5 R^{gg} groups, or two geminal R^{dd} substituents can be joined to form ═O or ═S; wherein X⁻ is a counterion;
[0109] each instance of R^{ee} is, independently, selected from C₁₋₆ alkyl, C₁₋₆ perhaloalkyl, C₂₋₆ alkenyl, C₂₋₆ alkynyl, heteroC₁₋₆ alkyl, heteroC₂₋₆alkenyl, heteroC₂₋₆ alkynyl, C₃₋₁₀ carbocyclyl, C₆₋₁₀ aryl, 3-10 membered heterocyclyl, and 3-10 membered heteroaryl, wherein each alkyl, alkenyl, alkynyl, heteroalkyl, heteroalkenyl, heteroalkynyl, carbocyclyl, heterocyclyl, aryl, and heteroaryl is independently substituted with 0, 1, 2, 3, 4, or 5 R^{gg} groups:
[0110] each instance of R^{ff} is, independently, selected from hydrogen, C₁₋₆ alkyl, C₁₋₆ perhaloalkyl, C₂₋₆ alkenyl, C₂₋₆ alkynyl, heteroC₁₋₆alkyl, heteroC₂₋₆alkenyl, heteroC₂₋₆alkynyl, C₃₋₁₀ carbocyclyl, 3-10 membered heterocyclyl, C₆₋₁₀ aryl and 5-10 membered heteroaryl, or two R^{ff} groups are joined to form a 3-10 membered heterocyclyl or 5-10 membered heteroaryl ring, wherein each alkyl, alkenyl, alkynyl, heteroalkyl, heteroalkenyl, heteroalkynyl, carbocyclyl, heterocyclyl, aryl, and heteroaryl is independently substituted with 0, 1, 2, 3, 4, or 5 R^{gg} groups; and
[0111] each instance of R^{gg} is, independently, halogen, —CN, —NO₂, —N₃, —SO₂H, —SO₃H, —OH, —OC₁₋₆ alkyl, —ON(C₁₋₆ alkyl)₂, —N(C₁₋₆ alkyl)₂, —N(C₁₋₆ alkyl)₃⁺X⁻, —NH(C₁₋₆ alkyl)₂⁺X⁻, —NH₂(C₁₋₆ alkyl)⁺X⁻, —NH₃⁺X⁻, —N(OC₁₋₆ alkyl)(C₁₋₆ alkyl), —N(OH)(C₁₋₆ alkyl), —NH(OH), —SH, —SC₁₋₆ alkyl, —SS(C₁₋₆ alkyl), —C(═O)(C₁₋₆ alkyl), —CO₂H, —CO₂(C₁₋₆ alkyl), —OC(═O)(C₁₋₆ alkyl), —OCO₂(C₁₋₆ alkyl), —C(═O)NH₂, —C(═O)N(C₁₋₆ alkyl)₂, —OC(═O)NH(C₁₋₆ alkyl), —NHC(═O)(C₁₋₆ alkyl), —N(C₁₋₆ alkyl)C(═O)(C₁₋₆ alkyl), —NHCO₂(C₁₋₆ alkyl), —NHC(═O)N(C₁₋₆ alkyl)₂, —NHC(═O)NH(C₁₋₆ alkyl), —NHC(═O)NH₂, —C(═NH)O(C₁₋₆ alkyl), —OC(═NH)(C₁₋₆ alkyl), —OC(═NH)OC₁₋₆ alkyl, —C(═NH)N(C₁₋₆ alkyl)₂, —C(═NH)NH(C₁₋₆ alkyl), —C(═NH)NH₂, —OC(═NH)N(C₁₋₆ alkyl)₂, —OC(NH)NH(C₁₋₆ alkyl), —OC(NH)NH₂, —NHC(NH)N(C₁₋₆ alkyl)₂, —NHC(═NH)NH₂, —NHSO₂(C₁₋₆ alkyl), —SO₂N(C₁₋₆ alkyl)₂, —SO₂NH(C₁₋₆ alkyl), —SO₂NH₂, —SO₂C₁₋₆ alkyl, —SO₂OC₁₋₆ alkyl, —OSO₂C₁₋₆ alkyl, —SOC₁₋₆ alkyl, —Si(C₁₋₆ alkyl)₃, —OSi(C₁₋₆ alkyl)₃ —C(═S)N(C₁₋₆ alkyl)₂, C(═S)NH(C₁₋₆ alkyl), C(═S)NH₂, —C(═O)S(C₁₋₆ alkyl), —C(═S)SC₁₋₆ alkyl, —SC(═S)SC₁₋₆ alkyl, —P(═O)(OC₁₋₆ alkyl)₂, —P(═O)(C₁₋₆ alkyl)₂, —OP(═O)(C₁₋₆ alkyl)₂, —OP(═O)(C₁₋₆ alkyl)₂, C₁₋₆ alkyl, C₁₋₆ perhaloalkyl, C₂₋₆ alkenyl, C₂₋₆ alkynyl, heteroC₁₋₆alkyl, heteroC₂₋₆alkenyl, heteroC₂₋₆alkynyl, C₃₋₁₀ carbocyclyl, C₆₋₁₀ aryl, 3-10 membered heterocyclyl, 5-10 membered heteroaryl; or two geminal R^{gg} substituents can be joined to form ═O or ═S; wherein X⁻ is a counterion.

[0112] A “counterion” or “anionic counterion” is a negatively charged group associated with a positively charged group in order to maintain electronic neutrality. An anionic counterion may be monovalent (i.e., including one formal negative charge). An anionic counterion may also be multivalent (i.e., including more than one formal negative charge), such as divalent or trivalent. Exemplary counterions include halide ions (e.g., F⁻, Cl⁻, Br⁻, I⁻), NO₃⁻, ClO₄⁻, OH⁻, H₂PO₄⁻, HCO₃⁻, HSO₄⁻, sulfonate ions (e.g., methansulfonate, trifluoromethanesulfonate, p-toluenesulfonate, benzenesulfonate, 10-camphor sulfonate, naphthalene-2-sulfonate, naphthalene-1-sulfonic acid-5-sulfonate, ethan-1-sulfonic acid-2-sulfonate, and the like), carboxylate ions (e.g., acetate, propanoate, benzoate, glycerate, lactate, tartrate, glycolate, gluconate, and the like), BF₄⁻, PF₄⁻, PF₆⁻, AsF₆⁻, SbF₆⁻, B[3,5-(CF₃)₂C₆H₃]₄]⁻, B(C₆F₅)₄⁻, BPh₄⁻, Al(OC(CF₃)₃)₄⁻, and carborane anions (e.g., CB₁₁H₁₂⁻ or (HCB₁₁Me₅Br₆)⁻). Exemplary counterions which may be multivalent include CO₃²⁻, HPO₄²⁻, PO₄³⁻, B₄O₇²⁻, SO₄²⁻, S₂O₃²⁻, carboxylate anions (e.g., tartrate, citrate, fumarate, maleate, malate, malonate, gluconate, succinate, glutarate, adipate, pimelate, suberate, azelate, sebacate, salicylate, phthalates, aspartate, glutamate, and the like), and carboranes.

[0113] The term “pharmaceutically acceptable salt” refers to those salts which are, within the scope of sound medical judgment, suitable for use in contact with the tissues of humans and lower animals without undue toxicity, irritation, allergic response and the like, and are commensurate with a reasonable benefit/risk ratio. Pharmaceutically acceptable salts are well known in the art. For example, Berge et al., describe pharmaceutically acceptable salts in detail in J. Pharmaceutical Sciences, 1977, 66, 1-19, incorporated by reference. Pharmaceutically acceptable salts of the compounds disclosed in this application include those derived from suitable inorganic and organic acids and bases. Examples of pharmaceutically acceptable, nontoxic acid addition salts are salts of an amino group formed with inorganic acids such as hydrochloric acid, hydrobromic acid, phosphoric acid, sulfuric acid, and perchloric acid or with organic acids such as acetic acid, oxalic acid, maleic acid, tartaric acid, citric acid, succinic acid, or malonic acid or by using other methods known in the art such as ion exchange. Other pharmaceutically acceptable salts include adipate, alginate, ascorbate, aspartate, benzenesulfonate, benzoate, bisulfate, borate, butyrate, camphorate, camphorsulfonate, citrate, cyclopentanepropionate, digluconate, dodecylsulfate, ethanesulfonate, formate, fumarate, glucoheptonate, glycerophosphate, gluconate, hemisulfate, heptanoate, hexanoate, hydroiodide, 2-hydroxy-ethanesulfonate, lactobionate, lactate, laurate, lauryl sulfate, malate, maleate, malonate, methanesulfonate, 2-naphthalenesulfonate, nicotinate, nitrate, oleate, oxalate, palmitate, pamoate, pectinate, persulfate, 3-phenylpropionate, phosphate, picrate, pivalate, propionate, stearate, succinate, sulfate, tartrate, thiocyanate, p-toluenesulfonate, undecanoate, valerate salts, and the like. Salts derived from appropriate bases include alkali metal, alkaline earth metal, ammonium and N⁺(C₁₋₄ alkyl)₄⁻ salts. Representative alkali or alkaline earth metal salts include sodium, lithium, potassium, calcium, magnesium, and the like. Further pharmaceutically acceptable salts include, when appropriate, nontoxic ammonium, quaternary ammonium, and amine cations formed using counterions such as halide, hydroxide, carboxylate, sulfate, phosphate, nitrate, lower alkyl sulfonate, and aryl sulfonate.

[0114] The term “solvate” refers to forms of a compound that are associated with a solvent, usually by a solvolysis reaction. This physical association may include hydrogen bonding. Conventional solvents include water, methanol, ethanol, acetic acid, DMSO, THF, diethyl ether, and the like. The compounds of Formula (1), (9), (10), and (11) may be prepared. e.g., in crystalline form, and may be solvated. Suitable solvates include pharmaceutically acceptable solvates and further include both stoichiometric solvates and non-stoichiometric solvates. In certain instances, the solvate will be capable of isolation, for example, when one or more solvent molecules are incorporated in the crystal lattice of a crystalline solid. “Solvate” encompasses both solution-phase and isolable solvates. Representative solvates include hydrates, ethanolates, and methanolates.

[0115] The term “hydrate” refers to a compound that is associated with water. Typically, the number of the water molecules contained in a hydrate of a compound is in a definite ratio to the number of the compound molecules in the hydrate. Therefore, a hydrate of a compound may be represented, for example, by the general formula R·x H₂O, wherein R is the compound and wherein x is a number greater than 0. A given compound may form more than one type of hydrates, including, e.g., monohydrates (x is 1), lower hydrates (x is a number greater than 0 and smaller than 1, e.g., hemihydrates (R·0.5 H₂O)), and polyhydrates (x is a number greater than 1, e.g., dihydrates (R·2 H₂O) and hexahydrates (R·6 H₂O)).

[0116] The term “tautomers” refer to compounds that are interchangeable forms of a particular compound structure, and that vary in the displacement of hydrogen atoms and electrons. Thus, two structures may be in equilibrium through the movement of a electrons and an atom (usually H). For example, enols and ketones are tautomers because they are rapidly interconverted by treatment with either acid or base. Another example of tautomerism is the aci- and nitro-forms of phenylnitromethane, which are likewise formed by treatment with acid or base. Tautomeric forms may be relevant to the attainment of the optimal chemical reactivity and biological activity of a compound of interest.

[0117] It is also to be understood that compounds that have the same molecular formula but differ in the nature or sequence of bonding of their atoms or the arrangement of their atoms in space are termed “isomers.” Isomers that differ in the arrangement of their atoms in space are termed “stereoisomers.”

[0118] Stereoisomers that are not mirror images of one another are termed “diastereomers” and those that are non-superimposable mirror images of each other are termed “enantiomers.” When a compound has an asymmetric center, for example, it is bonded to four different groups, a pair of enantiomers is possible. An enantiomer can be characterized by the absolute configuration of its asymmetric center and described by the R- and S-sequencing rules of Cahn and Prelog. An enantiomer can also be characterized by the manner in which the molecule rotates the plane of polarized light, and designated as dextrorotatory or levorotatory (i.e., as (+) or (−)-isomers respectively). A chiral compound can exist as either an individual enantiomer or as a mixture of enantiomers. A mixture containing equal proportions of the enantiomers is called a “racemic mixture.”

[0119] The term “co-crystal” refers to a crystalline structure comprising at least two different components (e.g., a compound described in this application and an acid), wherein each of the components is independently an atom, ion, or molecule. In certain embodiments, none of the components is a solvent. In certain embodiments, at least one of the components is a solvent. A co-crystal of a compound and an acid is different from a salt formed from a compound and the acid. In the salt, a compound described in this application is complexed with the acid in a way that proton transfer (e.g., a complete proton transfer) from the acid to a compound described in this application easily occurs at room temperature. In the co-crystal, however, a compound described in this application is complexed with the acid in a way that proton transfer from the acid to a compound described in this application does not easily occur at room temperature. In certain embodiments, in the co-crystal, there is no proton transfer from the acid to a compound described in this application. In certain embodiments, in the co-crystal, there is partial proton transfer from the acid to a compound described in this application. Co-crystals may be useful to improve the properties (e.g., solubility, stability, and ease of formulation) of a compound described in this application.

[0120] The term “polymorphs” refers to a crystalline form of a compound (or a salt, hydrate, or solvate thereof) in a particular crystal packing arrangement. All polymorphs of the same compound have the same elemental composition. Different crystalline forms usually have different X-ray diffraction patterns, infrared spectra, melting points, density, hardness, crystal shape, optical and electrical properties, stability, and solubility. Recrystallization solvent, rate of crystallization, storage temperature, and other factors may cause one crystal form to dominate. Various polymorphs of a compound can be prepared by crystallization under different conditions.

[0121] The term “prodrug” refers to compounds, including derivatives of the compounds of Formula (X), (8), (9), (10), or (11), that have cleavable groups and become by solvolysis or under physiological conditions the compounds of Formula (X), (8), (9), (10), or (11) and that are pharmaceutically active in vivo. The prodrugs may have attributes such as, without limitation, solubility, bioavailability, tissue compatibility, or delayed release in a mammalian organism. Examples include, but are not limited to, derivatives of compounds described in this application, including derivatives formed from glycosylation of the compounds described in this application (e.g., glycoside derivatives), carrier-linked prodrugs (e.g., ester derivatives), bioprecursor prodrugs (a prodrug metabolized by molecular modification into the active compound), and the like. Non-limiting examples of glycoside derivatives are disclosed in and incorporated by reference from PCT Publication No. WO2018/208875 and U.S. Patent Publication No. 2019/0078168. Non-limiting examples of ester derivatives are disclosed in and incorporated by reference from U.S. Patent Publication No. US2017/0362195.

[0122] Other derivatives of the compounds of this invention have activity in both their acid and acid derivative forms, but the acid sensitive form often offers advantages of solubility, bioavailability, tissue compatibility, or delayed release in a mammalian organism (see, Bundgard, H., Design of Prodrugs, pp. 7-9, 21-24, Elsevier, Amsterdam 1985). Prodrugs include acid derivatives well known to practitioners of the art, such as, for example, esters prepared by reaction of the parent acid with a suitable alcohol, or amides prepared by reaction of the parent acid compound with a substituted or unsubstituted amine, or acid anhydrides, or mixed anhydrides. Simple aliphatic or aromatic esters, amides, and anhydrides derived from acidic groups pendant on the compounds of this invention are particular prodrugs. In some cases it is desirable to prepare double ester type prodrugs such as (acyloxy)alkyl esters or ((alkoxycarbonyl)oxy)alkylesters. C₁-C₈ alkyl, C₂-C₈ alkenyl, C₂-C₈ alkynyl, aryl, C₇-C₁₂ substituted aryl, and C₇-C₁₂ arylalkyl esters of the compounds of Formula (X), (8), (9), (10), or (11) may be preferred.

### Cannabinoids

[0123] As used in this application, the term “cannabinoid” includes compounds of Formula (X):

[chemical structure]

or a pharmaceutically acceptable salt, co-crystal, tautomer, stereoisomer, solvate, hydrate, polymorph, isotopically enriched derivative, or prodrug thereof, wherein R1 is hydrogen, optionally substituted acyl, optionally substituted alkyl, optionally substituted alkenyl, optionally substituted alkynyl, optionally substituted carbocyclyl, or optionally substituted aryl; R2 and R6 are, independently, hydrogen or carboxyl; R3 and R5 are, independently, hydroxyl, halogen, or alkoxy; and R4 is a hydrogen or an optionally substituted prenyl moiety; or optionally R4 and R3 are taken together with their intervening atoms to form a cyclic moiety, or optionally R4 and R5 are taken together with their intervening atoms to form a cyclic moiety, or optionally both 1) R4 and R3 are taken together with their intervening atoms to form a cyclic moiety and 2) R4 and R5 are taken together with their intervening atoms to form a cyclic moiety. In certain embodiments, R4 and R3 are taken together with their intervening atoms to form a cyclic moiety. In certain embodiments, R4 and R5 are taken together with their intervening atoms to form a cyclic moiety. In certain embodiments, “cannabinoid” refers to a compound of Formula (X), or a pharmaceutically acceptable salt thereof. In certain embodiments, both 1) R4 and R3 are taken together with their intervening atoms to form a cyclic moiety and 2) R4 and R5 are taken together with their intervening atoms to form a cyclic moiety.

[0124] In some embodiments, cannabinoids may be synthesized via the following steps: a) one or more reactions to incorporate three additional ketone moieties onto an acyl-CoA scaffold, where the acyl moiety in the acyl-CoA scaffold comprises between four and fourteen carbons; b) a reaction cyclizing the product of step (a); and c) a reaction to incorporate a prenyl moiety to the product of step (b) or a derivative of the product of step (b). In some embodiments, non-limiting examples of the acyl-CoA scaffold described in step (a) include hexanoyl-CoA and butyryl-CoA. In some embodiments, non-limiting examples of the product of step (b) or a derivative of the product of step (b) include olivetolic acid, divarinic acid, and sphaerophorolic acid.

[0125] In some embodiments, a cannabinoid compound of Formula (X) is of Formula (X-A), (X-B), or (X-C):

[chemical structure]

or a pharmaceutically acceptable salt, solvate, hydrate, polymorph, co-crystal, tautomer, stereoisomer, isotopically labeled derivative, or prodrug thereof:
[0126] wherein [symbol] is a double bond or a single bond, as valency permits,
[0127] R is hydrogen, optionally substituted acyl, optionally substituted alkyl, optionally substituted alkenyl, optionally substituted alkynyl, optionally substituted carbocyclyl, or optionally substituted aryl;
[0128] R^{Z1} is hydrogen, optionally substituted acyl, optionally substituted alkyl, optionally substituted alkenyl, optionally substituted alkynyl, optionally substituted carbocyclyl, or optionally substituted aryl;
[0129] R^{Z2} is hydrogen, optionally substituted acyl, optionally substituted alkyl, optionally substituted alkenyl, optionally substituted alkynyl, optionally substituted carbocyclyl, or optionally substituted aryl;
[0130] or optionally, R^{Z1} and R^{Z2} are taken together with their intervening atoms to form an optionally substituted carbocyclic ring;
[0131] R^{3A} is hydrogen, optionally substituted acyl, optionally substituted alkyl, optionally substituted alkenyl, or optionally substituted alkynyl;
[0132] R^{3B} is hydrogen, optionally substituted acyl, optionally substituted alkyl, optionally substituted alkenyl, or optionally substituted alkynyl;
[0133] R^{Y} is hydrogen, optionally substituted acyl, optionally substituted alkyl, optionally substituted alkenyl, or optionally substituted alkynyl;
[0134] R^{Z} is hydrogen, optionally substituted acyl, optionally substituted alkyl, optionally substituted alkenyl, or optionally substituted alkynyl.

[0135] In certain embodiments, a cannabinoid compound is of Formula (X-A):

[chemical structure]

wherein [symbol] is a double bond, and each of R^{Z1} and R^{Z2} is hydrogen, one of R^{3A} and R^{3B} is optionally substituted C₂₋₆ alkenyl, and the other one of R^{3A} and R^{3B} is optionally substituted C₂₋₆ alkyl. In some embodiments, a cannabinoid compound of Formula (X) is of Formula (X-A), wherein each of R^{Z1} and R^{Z2} is hydrogen, one of R^{3A} and R^{3B} is a prenyl group, and the other one of R^{3A} and R^{3B} is optionally substituted methyl.

[0136] In certain embodiments, a cannabinoid compound of Formula (X) of Formula (X-A) is of Formula (11-z):

[chemical structure]

wherein [symbol] is a double bond or single bond, as valency permits; one of R^{3A} and R^{3B} is C₁₋₆ alkyl optionally substituted with alkenyl, and the other of R^{3A} and R^{3B} is optionally substituted C₁₋₆ alkyl. In certain embodiments, in a compound of Formula (11-z), [symbol] is a single bond; one of R^{3A} and R^{3B} is C₁₋₆ alkyl optionally substituted with prenyl; and the other of one of R^{3A} and R^{3B} is unsubstituted methyl; and R is as described in this application. In certain embodiments, in a compound of Formula (11-z), [symbol] is a single bond; one of R^{3A} and R^{3B} is

[chemical structure]

and the other of one of R^{3A} and R^{3B} is unsubstituted methyl; and R is as described in this application. In certain embodiments, a cannabinoid compound of Formula (11-z) is of Formula (11a):
[0137] om

[chemical structure]

[0138] In certain embodiments, a cannabinoid compound of Formula (X) of Formula (X-A) is of Formula (11a):

[chemical structure]

[0139] In certain embodiments, a cannabinoid compound of Formula (X-A) is of Formula (10-z):

[chemical structure]

wherein [symbol] is a double bond or single bond, as valency permits; R^{Y} is hydrogen, optionally substituted acyl, optionally substituted alkyl, optionally substituted alkenyl, or optionally substituted alkynyl; and each of R^{3A} and R^{3B} is independently optionally substituted C₁₋₆ alkyl. In certain embodiments, in a compound of Formula (10-z) [symbol] is a single bond; each of R^{3A} and R^{3B} is unsubstituted methyl, and R is as described in this application. In certain embodiments, a cannabinoid compound of Formula (10-z) is of Formula (10a):

[chemical structure]

In certain embodiments, a compound of Formula (10a)

[chemical structure]

has a chiral atom labeled with * at carbon 10 and a chiral atom labeled with ** at carbon 6. In certain embodiments, in a compound of Formula (10a)

[chemical structure]

the chiral atom labeled with * at carbon 10 is of the R-configuration or S-configuration; and a chiral atom labeled with ** at carbon 6 is of the R-configuration. In certain embodiments, in a compound of Formula (10a)

[chemical structure]

the chiral atom labeled with * at carbon 10 is of the S-configuration; and a chiral atom labeled with ** at carbon 6 is of the R-configuration or S-configuration. In certain embodiments, in a compound of Formula (10a)

[chemical structure]

the chiral atom labeled with * at carbon 10 is of the R-configuration and a chiral atom labeled with ** at carbon 6 is of the R-configuration. In certain embodiments, a compound of Formula (10a)

[chemical structure]

is of the formula:

[chemical structure]

In certain embodiments, in a compound of Formula (10a)

[chemical structure]

the chiral atom labeled with * at carbon 10 is of the S-configuration and a chiral atom labeled with ** at carbon 6 is of the S-configuration. In certain embodiments, a compound of Formula (10a)

[chemical structure]

is of the formula:

[chemical structure]

[0140] In certain embodiments, a cannabinoid compound is of Formula (X-B):

[chemical structure]

wherein [symbol] a double bond; R^{Y} is hydrogen, optionally substituted acyl, optionally substituted alkyl, optionally substituted alkenyl, or optionally substituted alkynyl; and each of R^{3A} and R^{3B} is independently optionally substituted C₁₋₆ alkyl. In certain embodiments, in a compound of Formula (X-B), R^{Y} is optionally substituted C₁₋₆ alkyl; one of R^{3A} and R^{3B} is

[chemical structure]

and the other one of R^{3A} and R^{3B} is unsubstituted methyl, and R is as described in this application. In certain embodiments, a compound of Formula (X-B) is of Formula (9a):

[chemical structure]

In certain embodiments, a compound of Formula (9a)

[chemical structure]

has a chiral atom labeled with * at carbon 3 and a chiral atom labeled with ** at carbon 4. In certain embodiments, in a compound of Formula (9a)

[chemical structure]

the chiral atom labeled with * at carbon 3 is of the R-configuration or S-configuration; and a chiral atom labeled with ** at carbon 4 is of the R-configuration. In certain embodiments, in a compound of Formula (9a)

[chemical structure]

the chiral atom labeled with * at carbon 3 is of the S-configuration; and a chiral atom labeled with ** at carbon 4 is of the R-configuration or S-configuration. In certain embodiments, in a compound of Formula (9a)

[chemical structure]

the chiral atom labeled with * at carbon 3 is of the R-configuration and a chiral atom labeled with ** at carbon 4 is of the R-configuration. In certain embodiments, a compound of Formula (9a)

[chemical structure]

is of the formula:

[chemical structure]

In certain embodiments, in a compound of Formula (9a)

[chemical structure]

the chiral atom labeled with * at carbon 3 is of the S-configuration and a chiral atom labeled with ** at carbon 4 is of the S-configuration. In certain embodiments, a compound of Formula (9a)

[chemical structure]

is of the formula:

[chemical structure]

[0141] In certain embodiments, a cannabinoid compound is of Formula (X-C):

[chemical structure]

wherein R^{Z} is optionally substituted alkyl or optionally substituted alkenyl. In certain embodiments, a compound of Formula (X-C) is of formula:

[chemical structure]

wherein a is 1, 2, 3, 4, 5, 6, 7, 8, 9, or 10. In certain embodiments, a is 1. In certain embodiments, a is 2. In certain embodiments, a is 3. In certain embodiments, a is 1, 2, or 3 for a compound of Formula (X-C). In certain embodiments, a cannabinoid compound is of Formula (X-C), and a is 1, 2, 3, 4, or 5. In certain embodiments, a compound of Formula (X-C) is of Formula (8a):

[chemical structure]

[0142] In some embodiments, cannabinoids of the present disclosure comprise cannabinoid receptor ligands. Cannabinoid receptors are a class of cell membrane receptors in the G protein-coupled receptor superfamily. Cannabinoid receptors include the CB₁ receptor and the CB₂ receptor. In some embodiments, cannabinoid receptors comprise GPR18, GPR55, and PPAR. (See Brain et al. “Activation of GPR18 by cannabinoid compounds: a tale of biased agonism” Br J Pharmcol v171 (16) (2014); Shi et al. “The novel cannabinoid receptor GPR55 mediates anxiolytic-like effects in the medial orbital cortex of mice with acute stress” Molecular Brain 10, No. 38 (2017); and O'Sullvan, Elizabeth. “An update on PPAR activation by cannabinoids” Br J Pharmcol v. 173(12) (2016)).

[0143] In some embodiments, cannabinoids comprise endocannabinoids, which are substances produced within the body, and phytocannabinoids, which are cannabinoids that are naturally produced by plants of genus Cannabis. In some embodiments, phytocannabinoids comprise the acidic and decarboxylated acid forms of the naturally-occurring plant-derived cannabinoids, and their synthetic and biosynthetic equivalents.

[0144] Over 94 phytocannabinoids have been identified to date (Berman, Paula, et al. “A new ESI-LC/MS approach for comprehensive metabolic profiling of phytocannabinoids in Cannabis.” Scientific reports 8.1 (2018): 14280; El-Alfy et al., 2010, “Antidepressant-like effect of delta-9-tetrahydrocannabinol and other cannabinoids isolated from Cannabis sativa L”, Pharmacology Biochemistry and Behavior 95 (4): 434-42; Rudolf Brenneisen, 2007, Chemistry and Analysis of Phytocannabinoids, Citti, Cinzia, et al. “A novel phytocannabinoid isolated from Cannabis sativa L. with an in vivo cannabimimetic activity higher than Δ9-tetrahydrocannabinol: Δ9-Tetrahydrocannabiphorol.” Sci Rep 9 (2019): 20335, each of which is incorporated by reference in this application in its entirety). In some embodiments, cannabinoids comprise Δ⁹-tetrahydrocannabinol (THC) type (e.g., (−)-trans-delta-9-tetrahydrocannabinol or dronabinol, (+)-trans-delta-9-tetrahydrocannabinol, (−)-cis-delta-9-tetrahydrocannabinol, or (+)-cis-delta-9-tetrahydrocannabinol), cannabidiol (CBD) type, cannabigerol (CBG) type, cannabichromene (CBC) type, cannabicyclol (CBL) type, cannabinodiol (CBND) type, or cannabitriol (CBT) type cannabinoids, or any combination thereof (see, e.g., R Pertwee, ed, Handbook of Cannabis (Oxford, UK: Oxford University Press, 2014)), which is incorporated by reference in this application in its entirety). A non-limiting list of cannabinoids comprises: cannabiorcol-C1 (CBNO), CBND-C1 (CBNDO), Δ⁹-trans-Tetrahydrocannabiorcolic acid-C1 (Δ⁹-THCO), Cannabidiorcol-C1 (CBDO), Cannabiorchromene-C1 (CBCO), (−)-Δ⁸-trans-(6aR,10aR)-Tetrahydrocannabiorcol-C1 (Δ⁸-THCO), Cannabiorcyclol C1 (CBLO). CBG-C1 (CBGO), Cannabinol-C2 (CBN-C2), CBND-C2, Δ⁹-THC-C2, CBD-C2, CBC-C2, Δ⁸-THC-C2, CBL-C2, Bisnor-cannabielsoin-C1 (CBEO), CBG-C2, Cannabivarin-C3 (CBNV), Cannabinodivarin-C3 (CBNDV), (−)-Δ⁹-trans-Tetrahydrocannabivarin-C3 (Δ⁹-THCV), (−)-Cannabidivarin-C3 (CBDV), (±)-Cannabichromevarin-C3 (CBCV), (−)-Δ⁸-trans-THC-C3 (Δ⁸-THCV), (+)-(1aS,3aR,8bR,8cR)-Cannabicyclovarin-C3 (CBLV), 2-Methyl-2-(4-methyl-2-pentenyl)-7-propyl-2H-1-benzopyran-5-ol, Δ⁷-tetrahydrocannabivarin-C3 (Δ⁷-THCV), CBE-C2. Cannabigerovarin-C3 (CBGV), Cannabitriol-C1 (CBTO), Cannabinol-C4 (CBN-C4), CBND-C4, (−)-Δ⁹-trans-Tetrahydrocannabinol-C4 (Δ⁹-THC-C4), Cannabidiol-C4 (CBD-C4), CBC-C4, (−)-trans-Δ⁸-THC-C4, CBL-C4, Cannabielsoin-C3 (CBEV), CBG-C4, CBT-C2, Cannabichromanone-C3, Cannabiglendol-C3 (OH-iso-HHCV-C3), Cannabioxepane-C5 (CBX), Dehydrocannabifuran-C5 (DCBF), Cannabinol-C5 (CBN), Cannabinodiol-C5 (CBND), (−)-Δ⁹-trans-Tetrahydrocannabinol-C5 (Δ⁹-THC), (−)-Δ⁸-trans-(6aR,10aR)-Tetrahydrocannabinol-C5 (Δ⁸-THC), (±)-Cannabichromene-C5 (CBC), (−)-Cannabidiol-C5 (CBD), (±)-(1aS,3aR,8bR,8cR)-CannabicyclolC5 (CBL), Cannabicitran-C5 (CBR), (−)-Δ⁹-(6aS,10aR-cis)-Tetrahydrocannabinol-C5 ((−)-cis-Δ⁹-THC), (−)-Δ⁷-trans-(1R,3R,6R)-Isotetrahydrocannabinol-C5 (trans-isoΔ⁷-THC), CBE-C4, Cannabigerol-C5 (CBG), Cannabitrol-C3 (CBTV), Cannabinol methyl ether-C5 (CBNM), CBNDM-C5, 8-OH-CBN-C5 (OH-CBN), OH-CBND-C5 (OH-CBND), 10-Oxo-Δ^{6a(10a)}-Tetrahydrocannabinol-C5 (OTHC), Cannabichromanone D-C5, Cannabicoumaronone-C5 (CBCON-C5), Cannabidiol monomethyl ether-C5 (CBDM), Δ⁹-THCM-C5, (±)-3″-hydroxy-Δ⁴″-cannabichromene-C5, (5aS,6S,9R,9aR)-Cannabielsoin-C5 (CBE), 2-geranyl-5-hydroxy-3-n-pentyl-1,4-benzoquinone-C5, 5-geranyl olivetolic acid, 5-geranyl olivetolate, 8α-Hydroxy-Δ⁹-Tetrahydrocannabinol-C5 (8α-OH-Δ⁹-THC), 8β-Hydroxy-Δ⁹-Tetrahydrocannabinol-C5 (8β-OH-Δ⁹-THC), 10α-Hydroxy-Δ⁸-Tetrahydrocannabinol-C5 (10α-OH-Δ⁸-THC), 10β-Hydroxy-Δ⁸-Tetrahydrocannabinol-C5 (10β-OH-Δ⁸-THC), 10α-hydroxy-Δ^{9,11}-hexahydrocannabinol-C5, 9β,10β-Epoxyhexahydrocannabinol-C5, OH-CBD-C5 (OH-CBD), Cannabigerol monomethyl ether-C5 (CBGM). Cannabichromanone-C5, CBT-C4, (±)-6,7-cis-epoxycannabigerol-C5, (±)-6,7-trans-epoxycannabigerol-C5, (−)-7-hydroxycannabichromane-C5, Cannabimovone-C5, (−)-trans-Cannabitriol-C5 ((−)-trans-CBT), (+)-trans-Cannabitriol-C5 ((+)-trans-CBT), (±)-cis-Cannabitriol-C5 ((±)-cis-CBT), (−)-trans-10-Ethoxy-9-hydroxy-Δ^{6a(10a)}-tetrahydrocannabivarin-C3 [(−)-trans-CBT-OEt], (−)-(6aR,9S,10S,10aR)-9,10-Dihydroxyhexahydrocannabinol-C5 [(−)-Cannabiripsol] (CBR), Cannabichromanone C-C5, (−)-6a,7,10a-Trihydroxy-Δ⁹-tetrahydrocannabinol-C5 [(−)-Cannabitetrol] (CBTT), Cannabichromanone B-C5, 8,9-Dihydroxy-Δ^{6a(10a)}-tetrahydrocannabinol-C5 (8,9-Di-OHCBT), (±)-4-acetoxycannabichromene-C5, 2-acetoxy-6-geranyl-3-n-pentyl-1,4-benzoquinone-C5, 11-Acetoxy-Δ 9-TetrahydrocannabinolC5 (11-OAc-Δ 9-THC), 5-acetyl-4-hydroxycannabigerol-C5, 4-acetoxy-2-geranyl-5-hydroxy-3-npentylphenol-C5, (−)-trans-10-Ethoxy-9-hydroxy-Δ^{6a(10a)}-tetrahydrocannabinol-C5 ((−)-trans-CBTOEt), sesquicannabigerol-C5 (SesquiCBG), carmagerol-C5, 4-terpenyl cannabinolate-C5, β-fenchyl-Δ⁹-tetrahydrocannabinolate-C5, α-fenchyl-Δ⁹-tetrahydrocannabinolate-C5, epi-bornyl-Δ⁹-tetrahydrocannabinolate-C5, bornyl-Δ⁹-tetrahydrocannabinolate-C5, α-terpenyl-Δ⁹-tetrahydrocannabinolate-C5, 4-terpenyl-Δ⁹-tetrahydrocannabinolate-C5, 6,6,9-trimethyl-3-pentyl-6H-dibenzo[b,d]pyran-1-ol, 3-(1,1-dimethylheptyl)-6,6a,7,8,10,10a-hexahydro-1-hydroxy-6,6-dimethyl-9H-dibenzo[b,d]pyran-9-one, (−)-(3S,4S)-7-hydroxy-Δ⁶-tetrahydrocannabinol-1,1-dimethylheptyl, (+)-(3S,4S)-7-hydroxy-Δ⁶-tetrahydrocannabinol-1,1-dimethylheptyl, 11-hydroxy-Δ⁹-tetrahydrocannabinol, and Δ⁸-tetrahydrocannabinol-11-oic acid)); certain piperidine analogs (e.g., (−)-(6S,6aR,9R,10aR)-5,6a,7,8,9,10,10a-octahydro-6-methyl-3-[(R)-1-methy-4-phenylbutoxy]-1,9-phenanthridinediol 1-acetate)), certain aminoalkylindole analogs (e.g., (R)-(+)-[2,3-dihydro-5-methyl-3-(4-morpholinymlethyl)-pyrrolo[1,2,3-de]-1,4-benzoxazin-6-yl]-1-naphthalenyl-methanone), certain open pyran ring analogs (e.g., 2-[3-methyl-6-(1-methylethenyl)-2-cyclohexen-1-yl]-5-pentyl-1,3-benzenediol and 4-(1,1-dimethylheptyl)-2,3′-dihydroxy-6′alpha-(3-hydroxypropyl)-1′,2′,3′,4′,5′6′-hexahydrobiphenyl, tetrahydrocannabiphorol (THCP), cannabidiphorol (CBDP), CBGP, CBCP, their acidic forms, salts of the acidic forms, dimers of any combination of the above, trimers of any combination of the above, polymers of any combination of the above, or any combination thereof.

[0145] A cannabinoid described in this application can be a rare cannabinoid. For example, in some embodiments, a cannabinoid described in this application corresponds to a cannabinoid that is naturally produced in conventional Cannabis varieties at concentrations of less than 10%, 9%, 8%, 7%, 6%, 5%, 4%, 3%, 2%, 1%, 0.9%, 0.8%, 0.7%, 0.6%, 0.5%, 0.25%, or 0.1% by dry weight of the female flower. In some embodiments, rare cannabinoids include CBGA, CBGVA, THCVA, CBDVA, CBCVA, and CBCA. In some embodiments, rare cannabinoids are cannabinoids that are not THCA, THC, CBDA or CBD.

[0146] A cannabinoid described in this application can also be a non-rare cannabinoid.

[0147] In some embodiments, the cannabinoid is selected from the cannabinoids listed in Table 1.

TABLE 1
Non-limiting examples of cannabinoids according to the present disclosure.

[chemical structure]

Δ⁹-Tetrahydro-
cannabinol
Δ⁹-THC-C₅

[chemical structure]

Δ⁹-Tetrahydro-
cannabinol-C₄
Δ⁹-THC-C₄

[chemical structure]

Δ⁹-Tetrahydro-
cannabivarin
Δ⁹-THCV-C₃

[chemical structure]

Δ⁹-Tetrahydro-
cannabiorcol
Δ⁹-THCO-C₁

[chemical structure]

(−)-(6aS,10aR)-Δ⁹-
Tetrahydro-
cannabinol
(−)-cis-Δ⁹-THC-C₅

[chemical structure]

Δ⁹-Tetrahydro-
cannabinolic acid A
Δ⁹-THCA-C₅ A

[chemical structure]

Δ⁹-Tetrahydro-
cannabinolic acid B
Δ⁹-THCA-C₅ B

[chemical structure]

Δ⁹-Tetrahydro-
cannabinolic acid-C₄
A and/or B
Δ⁹-THCA-C₄ A and/or
B

[chemical structure]

Δ⁹-Tetrahydro-
cannabivarinic acid A
Δ⁹-THCVA-C₃ A

[chemical structure]

Δ⁹-Tetrahydro-
cannabiorcolic acid
A and/or B
Δ⁹-THCOA-C₁ A
and/or B

[chemical structure]

(−)-Δ⁸-trans-
(6aR,10aR)-
Δ⁸-Tetrahydro-
cannabinol
Δ⁸-THC-C₅

[chemical structure]

(−)-Δ⁸-trans-
(6aR,10aR)-
Tetrahydro-
cannabinolic
acid A
Δ⁸-THCA-C₅ A

[chemical structure]

(−)-Cannabidiol
CBD-C5

[chemical structure]

Cannabidiol
momomethyl ether
CBDM-C5

[chemical structure]

Cannabidiol-C4
CBD-C4

[chemical structure]

Cannabidiolic acid
CBDA-C5

[chemical structure]

Cannabidivarinic acid
CBDVA-C3

[chemical structure]

(−)-Cannabidivarin
CBDV-C3

[chemical structure]

Cannabidiorcol
CBD-C1

[chemical structure]

Cannabigerolic acid A
(E)-CBGA-C₅ A

[chemical structure]

Cannabigerol
(E)-CBG-C₅

[chemical structure]

Cannabigerol
monomethyl ether
(E)-CBGM-C₅ A

[chemical structure]

Cannabinerolic acid A
(Z)-CBGA-C₅ A

[chemical structure]

Cannabigerovarin
(E)-CBGV-C₃

[chemical structure]

Cannabigerol
(E)-CBG-C₅

[chemical structure]

Cannabigerolic acid A
(E)-CBGA-C₅ A

[chemical structure]

Cannabigerolic acid A
monomethyl ether
(E)-CBGAM-C₅ A

[chemical structure]

Cannabigerovarinic
acid A
(E)-CBGVA-C₃ A

[chemical structure]

Cannabinolic acid A
CBNA-C5 A

[chemical structure]

Cannabinol methyl
ether
CBNM-C5

[chemical structure]

Cannabinol
CBN-C5

[chemical structure]

Cannabinol-C4
CBN-C4

[chemical structure]

Cannabivarin
CBN-C3

[chemical structure]

Cannabinol-C2
CBN-C2

[chemical structure]

Cannabiorcol
CBN-C1

[chemical structure]

(±)-Cannabichromene
CBC-C₅

[chemical structure]

(±)-Cannabichromenic
acid A
CBCA-C₅ A

[chemical structure]

(±)-
Cannabivarichromene,
(±)-
Cannabichromevarin
CBCV-C₃

[chemical structure]

(±)-Cannabichro-
mevarinic
acid A
CBCVA-C₃ A

[chemical structure]

(±)-Cannabichromene
CBC-C₅

[chemical structure]

(±)-(1aS,3aR,8bR,8cR)-
Cannabicyclol
CBL-C₅

[chemical structure]

(±)-(1aS,3aR,8bR,8cR)-
Cannabicyclolic acid A
CBLA-C₅ A

[chemical structure]

(±)-
(1aS,3aR,8bR,8cR)-
Cannabicyclovarin
CBLV-C₃

[chemical structure]

(−)-(9R,10R)-trans-
10-O-Ethyl-
cannabitriol
(−)-trans-CBT-OEt-C5

[chemical structure]

(±)-(9R,10R/9S,10S)-
Cannabitriol-C3
(±)-trans-CBT-C3

[chemical structure]

(−)-(9R,10R)-trans-
Cannabitriol
(−)-trans-CBT-C5

[chemical structure]

(+)-(9S,10S)-
Cannabitriol
(+)-trans-CBT-C5

[chemical structure]

(±)-(9R,10S/9S,10R)-
Cannabitriol
(±)-cis-CBT-C5

[chemical structure]

(−)-6a,7,10a-Trihydroxy-
Δ9-tetrahydro-
cannabinol
(−)-Cannabitetrol

[chemical structure]

10-Oxo-Δ6a(10a)-
tetrahydro-
cannabinol
OTHC

[chemical structure]

8,9-Dihydroxy-
Δ6a(10a)-
tetrahydro-
cannabinol
8,9-Di-OH-CBT-C5

[chemical structure]

Cannabidiolic acid A
cannabitriol ester
CBDA-C5 9-OH-CBT-
C5 ester

[chemical structure]

(−)-
(6aR,98,10S,10aR)-
9,10-Dihydroxy-
hexahydrocannabinol,
Cannabiripsol
Cannabiripsol-C5

[chemical structure]

(5aS,6S,9R,9aR)-
Cannabielsoic acid B
CBEA-C5 B

[chemical structure]

(5aS,68,9R,9aR)-
C3-Cannabielsoic
acid B
CBEA-C3 B

[chemical structure]

(5aS,6S,9R,9aR)-
Cannabielsoin
CBE-C5

[chemical structure]

(5aS,6S,9R,9aR)-
C3-Cannabielsoin
CBB-C3

[chemical structure]

(5aS,68,9R,9aR)-
Cannabielsoic acid A.
CBEA-C5 A

[chemical structure]

Cannabiglendol-C3
OH-iso-HHCV-C3

[chemical structure]

Dehydro-
cannabifuran
DCBF-C5

[chemical structure]

Cannabifuran
CBF-C5

[chemical structure]

Cannabidiphorol
(CBDP)

[chemical structure]

Tetrahydro-
cannabiphorol
(THCP)

[chemical structure]

[0148] Cannabinoids are often classified by “type”, i.e., by the topological arrangement of their prenyl moieties (See, for example, M. A. Elsohly and D. Slade, Life Sci., 2005, 78, 539-548; and L. O. Hanus et al. Nat. Prod. Rep., 2016, 33, 1357). Generally, each “type” of cannabinoid includes the variations possible for ring substitutions of the resorcinol moiety at the position meta to the two hydroxyl moieties. As used herein, a “CBG-type” cannabinoid is a 3-[(2E)-3,7-dimethylocta-2,6-dienyl]-2,4-dihydroxybenzoic acid optionally substituted at the 6 position of the benzoic acid moiety. As used herein, “CBC-type” cannabinoids refer to 5-hydroxy-2-methyl-2-(4-methylpent-3-enyl)-chromene-6-carboxylic acid optionally substituted at the 7 position of the chromene moiety. As used herein, a “THC-type” cannabinoid is a (6aR,10aR)-1-hydroxy-6,6,9-trimethyl-6a,7,8,10a-tetrahydrobenzo[c]chromene-2-carboxylic acid optionally substituted at the 3 position of the benzo[c]chromene moiety. As used herein, a “CBD-type” cannabinoid is a 2,4-dihydroxy-3-[(1R,6R)-3-methyl-6-prop-1-en-2-ylcyclohex-2-en-1-yl]-benzoic acid optionally substituted at the 6 position of the benzoic acid moiety. In some embodiments, the optional ring substitution for each “type” is an optionally substituted C1-C11 alkyl, an optionally substituted C1-C11 alkenyl, an optionally substituted C1-C11 alkynyl, or an optionally substituted C1-C11 aralkyl.

### Biosynthesis of Cannabinoids and Cannabinoid Precursors

[0149] Aspects of the present disclosure provide tools, sequences, and methods for the biosynthetic production of cannabinoids in host cells. In some embodiments, the present disclosure teaches expression of enzymes that are capable of producing cannabinoids by biosynthesis.

[0150] As a non-limiting example, one or more of the enzymes depicted in FIG. 2 may be used to produce a cannabinoid or cannabinoid precursor of interest. FIG. 1 shows a cannabinoid biosynthesis pathway for the most abundant phytocannabinoids found in Cannabis. See also, de Meijer et al. I, II, III, and IV (I: 2003, Genetics, 163:335-346; II: 2005, Euphytica, 145:189-198; III: 2009, Euphytica, 165:293-311; and IV: 2009, Euphytica, 168:95-112), and Carvalho et al. “Designing Microorganisms for Heterologous Biosynthesis of Cannabinoids” (2017) FEMS Yeast Research June 1:17(4), each of which is incorporated by reference in this application in its entirety for all purposes.

[0151] It should be appreciated that a precursor substrate for use in cannabinoid biosynthesis is generally selected based on the cannabinoid of interest. Non-limiting examples of cannabinoid precursors include compounds of Formulae (1)-(8) in FIG. 2. In some embodiments, polyketides, including compounds of Formula (5), could be prenylated. In certain embodiments, the precursor is a precursor compound shown in FIG. 1, 2, or 3. Substrates in which R contains 1-40 carbon atoms are preferred. In some embodiments, substrates in which R contains 3-8 carbon atoms are most preferred.

[0152] As used in this application, a cannabinoid or a cannabinoid precursor may comprise an R group. See, e.g., FIG. 2. In some embodiments, R may be a hydrogen. In certain embodiments, R is optionally substituted alkyl. In certain embodiments, R is optionally substituted C₁₋₄₀ alkyl. In certain embodiments, R is optionally substituted C2-40 alkyl. In certain embodiments, R is optionally substituted C2-40 alkyl, which is straight chain or branched alkyl. In certain embodiments, R is optionally substituted C3-8 alkyl. In certain embodiments, R is optionally substituted C1-C40 alkyl, C1-C20 alkyl, C1-C10 alkyl, C1-C8 alkyl, C1-C5 alkyl, C3-C5 alkyl, C3 alkyl, or C5 alkyl. In certain embodiments, R is optionally substituted C1-C20 alkyl. In certain embodiments, R is optionally substituted C1-C10 alkyl. In certain embodiments, R is optionally substituted C1-C8 alkyl. In certain embodiments, R is optionally substituted C1-C5 alkyl. In certain embodiments, R is optionally substituted C1-C7 alkyl. In certain embodiments, R is optionally substituted C3-C5 alkyl. In certain embodiments, R is optionally substituted C3 alkyl. In certain embodiments, R is unsubstituted C3 alkyl. In certain embodiments, R is n-C3 alkyl. In certain embodiments, R is n-propyl. In certain embodiments, R is n-butyl. In certain embodiments, R is n-pentyl. In certain embodiments, R is n-hexyl. In certain embodiments, R is n-heptyl. In certain embodiments, R is of formula:

[chemical structure]

In certain embodiments, R is optionally substituted C4 alkyl. In certain embodiments, R is unsubstituted C4 alkyl. In certain embodiments, R is optionally substituted C5 alkyl. In certain embodiments, R is unsubstituted C5 alkyl. In certain embodiments, R is optionally substituted C6 alkyl. In certain embodiments, R is unsubstituted C6 alkyl. In certain embodiments, R is optionally substituted C7 alkyl. In certain embodiments, R is unsubstituted C7 alkyl. In certain embodiments, R is of formula:

[chemical structure]

In certain embodiments, R is of formula:

[chemical structure]

In certain embodiments, R is of formula:

[chemical structure]

In certain embodiments, R is of formula

[chemical structure]

In certain embodiments, R is of formula:

[chemical structure]

In certain embodiments, R is optionally substituted n-propyl. In certain embodiments, R is n-propyl optionally substituted with optionally substituted aryl. In certain embodiments, R is n-propyl optionally substituted with optionally substituted phenyl. In certain embodiments, R is n-propyl substituted with unsubstituted phenyl. In certain embodiments, R is optionally substituted butyl. In certain embodiments, R is optionally substituted n-butyl. In certain embodiments, R is n-butyl optionally substituted with optionally substituted aryl. In certain embodiments, R is n-butyl optionally substituted with optionally substituted phenyl. In certain embodiments, R is n-butyl substituted with unsubstituted phenyl. In certain embodiments, R is optionally substituted pentyl. In certain embodiments, R is optionally substituted n-pentyl. In certain embodiments, R is n-pentyl optionally substituted with optionally substituted aryl. In certain embodiments, R is n-pentyl optionally substituted with optionally substituted phenyl. In certain embodiments, R is n-pentyl substituted with unsubstituted phenyl. In certain embodiments, R is optionally substituted hexyl. In certain embodiments, R is optionally substituted n-hexyl. In certain embodiments, R is optionally substituted n-heptyl. In certain embodiments, R is optionally substituted n-octyl. In certain embodiments, R is alkyl optionally substituted with aryl (e.g., phenyl). In certain embodiments. R is optionally substituted acyl (e.g., —C(═O)Me).

[0153] In certain embodiments, R is optionally substituted alkenyl (e.g., substituted or unsubstituted C₂₋₆ alkenyl). In certain embodiments, R is substituted or unsubstituted C₂₋₆ alkenyl. In certain embodiments, R is substituted or unsubstituted C₂₋₅ alkenyl. In certain embodiments, R is of formula:

[chemical structure]

In certain embodiments, R is optionally substituted alkynyl (e.g., substituted or unsubstituted C₂₋₆ alkynyl). In certain embodiments, R is substituted or unsubstituted C₂₋₆ alkynyl. In certain embodiments, R is of formula:

[chemical structure]

In certain embodiments, R is optionally substituted carbocyclyl. In certain embodiments, R is optionally substituted aryl (e.g., phenyl or napthyl).

[0154] The chain length of a precursor substrate can be from C1-C40. Those substrates can have any degree and any kind of branching or saturation or chain structure, including, without limitation, aliphatic, alicyclic, and aromatic. In addition, they may include any functional groups including hydroxy, halogens, carbohydrates, phosphates, methyl-containing or nitrogen-containing functional groups.

[0155] In some embodiments, R is H, an optionally substituted C1-C11 alkyl, an optionally substituted C1-C11 alkenyl, an optionally substituted C1-C11 alkynyl, or an optionally substituted C1-C11 aralkyl.

[0156] For example, FIG. 3 shows a non-exclusive set of putative precursors for the cannabinoid pathway. Aliphatic carboxylic acids including four to eight total carbons (“C4”-“C8” in FIG. 3) and up to 10-12 total carbons with either linear or branched chains may be used as precursors for the heterologous pathway. Non-limiting examples include methanoic acid, butyric acid, pentanoic acid, hexanoic acid, heptanoic acid, isovaleric acid, octanoic acid, and decanoic acid. Additional precursors may include ethanoic acid and propanoic acid. In some embodiments, in addition to acids, the ester, salt, and acid forms may all be used as substrates. Substrates may have any degree and any kind of branching, saturation, and chain structure, including, without limitation, aliphatic, alicyclic, and aromatic. In addition, they may include any functional modifications or combination of modifications including, without limitation, halogenation, hydroxylation, amination, acylation, alkylation, phenylation, and/or installation of pendant carbohydrates, phosphates, sulfates, heterocycles, or lipids, or any other functional groups.

[0157] Substrates for any of the enzymes disclosed in this application may be provided exogenously or may be produced endogenously by a host cell. In some embodiments, the cannabinoids are produced from a glucose substrate, so that compounds of Formula 1 shown in FIG. 2 and CoA precursors are synthesized by the cell. In other embodiments, a precursor is fed into the reaction. In some embodiments, a precursor is a compound selected from Formulae 1-8 in FIG. 2.

[0158] Cannabinoids produced by methods disclosed in this application include rare cannabinoids. Due to the low concentrations at which cannabinoids, including rare cannabinoids, occur in nature, producing industrially significant amounts of isolated or purified cannabinoids from the Cannabis plant may become prohibitive, especially in the case of rare cannabinoids, due to, e.g., the large volumes of Cannabis plants, and the large amounts of space, labor, time, and capital requirements to grow, harvest, and/or process the plant materials (see, for example, Crandall, K., 2016. A Chronic Problem: Taming Energy Costs and Impacts from Marijuana Cultivation. EQ Research; Mills, E., 2012. The carbon footprint of indoor Cannabis production. Energy Policy, 46, pp. 58-67; Jourabchi. M. and M. Lahet. 2014. Electrical Load Impacts of Indoor Commercial Cannabis Production. Presented to the Northwest Power and Conservation Council; O'Hare, M., D. Sanchez, and P. Alstone. 2013. Environmental Risks and Opportunities in Cannabis Cultivation. Washington State Liquor and Cannabis Board; 2018. Comparing Cannabis Cultivation Energy Consumption. New Frontier Data; and Madhusoodanan. J., 2019. Can Cannabis go green? Nature Outlook: Cannabis; all of which are incorporated by reference in this disclosure). The disclosure provided in this application represents a potentially efficient method for producing high yields of cannabinoids, including rare cannabinoids. The disclosure provided in this application also represents a potential method for addressing concerns related to agricultural practices and water usage associated with traditional methods of cannabinoid production (Dillis et al. “Water storage and irrigation practices for Cannabis drive seasonal patterns of water extraction and use in Northern California.” Journal of Environmental Management 272 (2020): 110955, incorporated by reference in this disclosure).

[0159] Cannabinoids produced by the disclosed methods also include non-rare cannabinoids. Without being bound by a particular theory, the methods described in this application may be advantageous compared with traditional plant-based methods for producing non-rare cannabinoids. For example, methods provided in this application represent potentially efficient means for producing consistent and high yields of non-rare cannabinoids. With traditional methods of cannabinoid production, in which cannabinoids are harvested from plants, maintaining consistent and uniform conditions, including airflow, nutrients, lighting, temperature, and humidity, can be difficult. For example, with plant-based methods, there can be microclimates created by branching, which can lead to inconsistent yields and by-product formation. In some embodiments, the methods described in this application are more efficient at producing a cannabinoid of interest as compared to harvesting cannabinoids from plants. For example, with plant-based methods, seed-to-harvest can take up to half a year, while cutting-to-harvest usually takes about 4 months. Additional steps including drying, curing, and extraction are also usually needed with plant-based methods. In contrast, in some embodiments, the fermentation-based methods described in this application only take about 1, 2, 3, 4, 5, 6, 7, 8, 9, or 10 days. In some embodiments, the fermentation-based methods described in this application only take about 3-5 days. In some embodiments, the fermentation-based methods described in this application only take about 5 days. In some embodiments, the methods provided in this application reduce the amount of security needed to comply with regulatory standards. For example, a smaller secured area may be needed to be monitored and secured to practice the methods described in this application as compared to the cultivation of plants. In some embodiments, the methods described in this application are advantageous over plant-sourced cannabinoids.

### Penyltransferase (PT)

[0160] Aspects of the disclosure relate to prenyltransferase (PT) enzymes. As used in this disclosure, a “PT” refers to an enzyme that is capable of transferring prenyl groups to acceptor molecule substrates. Non-limiting examples of prenyltransferases are described in U.S. Pat. No. 7,544,498 and Kumano et al., Bioorg Med Chem. 2008 Sep. 1; 16(17): 8117-8126 (e.g., NphB), PCT Publication No. WO 2018/200888 (e.g., CsPT4), U.S. Pat. No. 8,884,100 (e.g., CsPT1); CA2718469; Valliere et al., Nat Commun. 2019 Feb. 4; 10(1):565 (e.g., NphB variants); PCT Publication Nos: WO2019/173770, WO2019/183152, and WO2020/210810 (e.g., NphB variants); Luo et al., Nature 2019 March; 567(7746):123-126 (e.g., CsPT4); and WO2021/034848. In some embodiments, a PT is capable of producing cannabigerolic acid (CBGA), cannabigerophorolic acid (CBGPA), cannabigerovarinic acid (CBGVA), a CBG-type cannabinoid, or other cannabinoids or cannabinoid-like substances. In some embodiments, a PT is a cannabigerolic acid synthase (CBGAS). In some embodiments, a PT is cannabigerovarinic acid synthase (CBGVAS).

[0161] In some embodiments, the PT is a NphB prenyltransferase. See, e.g., U.S. Pat. No. 7,544,498; and Kumano et al., Bioorg Med Chem. 2008 Sep. 1; 16(17): 8117-8126, which are incorporated by reference in this application in their entireties. In some embodiments, a PT corresponds to NphB from Streptomyces sp. (see, e.g., UniprotKB Accession No. Q4R2T2, see also SEQ ID NO: 2 of U.S. Pat. No. 7,361,483). The protein sequence corresponding to UniprotKB Accession No. Q4R2T2 is provided by SEQ ID NO: 1:

(SEQ ID NO: 1)
[sequence omitted]

[0162] A non-limiting example of a nucleic acid sequence encoding NphB is:

(SEQ ID NO: 2)
atgtcagaagccgcagatgtcgaaagagtttacgccgcta
tggaagaagccgccggittgttaggtgttgcctgtgccag
agataagatctacccattgttgtctacttttcaagataca
ttagttgaaggggttcagttgttgttttctctatggcttc
aggtagacattctacagaattggatttctctatctcagtt
ccaacatcacatggtgatccatacgctactgttgttgaaa
aaggtttatttccagcaacaggtcatccagttgatgattt
gttggctgatactcaaaagcatttgccagittctatgtit
gcaattgatggtgaagttactggtggtttcaagaaaactt
acgctttctttccaactgataacatgccaggtgttgcaga
attatctgctattccatcaatgccaccagctgttgcagaa
aatgcagaattatttgctagatacggtttggataaggttc
aaatgacatctatggattacaagaaaagacaagttaattt
gtactittctgaattatcagcacaaactitggaagctgaa
tcagttttggcattagttagagaattgggtitacatgttc
caaacgaattgggtttgaagttttgtaaaagatctttctc
agtttatccaactttaaactgggaaacaggcaagatcgat
agattatgtttcgcagttatctctaacgatccaacattgg
ttccatcttcagatgaaggtgatatcgaaaagtttcataa
ctacgctactaaagcaccatatgcttacgttggtgaaaag
agaacattagtttatggittgactttatcaccaaaggaag
aatactacaagttgggtgcttactaccacattaccgacgt
acaaagaggtttattgaaagcattcgatagtttagaagac
taa.

[0163] In other embodiments, a PT is CsPT1, which is disclosed as SEQ ID NO:2 in U.S. Pat. No. 8,884,100, corresponding to SEQ ID NO: 3 in this application:

(SEQ ID NO: 3)
MGLSSVCTFSFQTNYHTLLNPHNNNPKTSLLCYRHPKTPI
KYSYNNFPSKHCSTKSFHLQNKCSESLSIAKNSIRAATTN
QTEPPESDNHSVATKILNFGKACWKLQRPYTIIAFTSCAC
GLFGKELLHNTNLISWSLMFKAFFFLVAILCIASFTTTIN
QIYDLHIDRINKPDLPLASGEISVNTAWIMSIIVALFGLI
ITIKMKGGPLYIFGYCFGIFGGIVYSVPPFRWKQNPSTAF
LLNFLAHIITNFTFYYASRAALGLPFELRPSFTFLLAFMK
SMGSALALIKDASDVEGDTKFGISTLASKYGSRNLTLFCS
GIVLLSYVAAILAGIIWPQAFNSNVMLLSHAILAFWLILQ
TRDFALTNYDPEAGRRFYEFMWKLYYAEYLVYVFI.

[0164] In some embodiments, a PT is a truncated CsPT1. In some embodiments, a truncated CsPT1 corresponds to SEQ ID NO: 1185:

(SEQ ID NO: 1185)
MAATTNQTEPPESDNHSVATKILNFGKACWKLQRPYTIIAFTSCACGLF
GKELLHNTNLISWSLMFKAFFFLVAILCIASFTTTINQIYDLHIDRINK
PDLPLASGEISVNTAWIMSIIVALFGLIITIKMKGGPLYIFGYCFGIFG
GIVYSVPPFRWKQNPSTAFLLNFLAHIITNFTFYYASRAALGLPFELRP
SFTFLLAFMKSMGSALALIKDASDVEGDTKFGISTLASKYGSRNLTLFc
SGIVLLSYVAAILAGIIWPQAFNSNVMLLSHAILAFWLILQTRDFALTN
YDPEAGRRFYEFMWKLYYAEYLVYVFI.

[0165] In some embodiments, a PT is CsPT4, which is disclosed as SEQ ID NO:1 in WO 2019/071000, corresponding to SEQ ID NO: 4 in this application;

(SEQ ID NO: 4)
MGLSLVCTFSFQTNYHTLLNPHNKNPKNSLLSYQHPKTPIIKSSYDNFP
SKYCLTKNFHLLGLNSHNRISSQSRSIRAGSDQIEGSPHHESDNSIATK
ILNFGHTCWKLQRPYVVKGMISIACGLFGRELFNNRHLFSWGLMWKAFF
ALVPILSFNFFAAIMNQIYDVDIDRINKPDLPLVSGEMSIETAWILSII
VALTGLIVTIKLKSAPLFVFIYIFGIFAGFAYSVPPIRWKQYPFTNFLI
TISSHVGLAFTSYSATTSALGLPFVWRPAFSFIIAFMTVMGMTIAFAKD
ISDIEGDAKYGVSTVATKLGARNMTFVVSGVLLLNYLVSISIGIIWPQV
FKSNIMILSHAILAFCLIFQTRELALANYASAPSRQFFEFIWLLYYAEY
FVYVFI.

[0166] In some embodiments, a PT is a truncated CsPT4. In some embodiments, a truncated CsPT4 is provided by SEQ ID NO: 5;

(SEQ ID NO: 5)
MSAGSDQIEGSPHHESDNSIATKILNFGHTCWKLQRPYVVKGMISIACG
LFGRELFNNRHLFSWGLMWKAFFALVPILSFNFFAAIMNQIYDVDIDRI
NKPDLPLVSGEMSIETAWILSIIVALTGLIVTIKLKSAPLFVFIYIFGI
FAGFAYSVPPIRWKQYPFTNFLITISSHVGLAFTSYSATTSALGLPFVW
RPAFSFIIAFMTVMGMTIAFAKDISDIEGDAKYGVSTVATKLGARNMTF
VVSGVLLLNYLVSISIGIIWPQVFKSNIMILSHAILAFCLIFQTRELAL
ANYASAPSRQFFEFIWLLYYAEYFVYVFI.

[0167] In some embodiments, a truncated CsPT4 is provided by SEQ ID NO: 6.

(SEQ ID NO: 6)
SAGSDQIEGSPHHESDNSIATKILNFGHTCWKLQRPYVVKGMISIACGL
FGRELFNNRHLFSWGLMWKAFFALVPILSFNFFAAIMNQIYDVDIDRIN
KPDLPLVSGEMSIETAWILSIIVALTGLIVTIKLKSAPLFVFIYIFGIF
AGFAYSVPPIRWKQYPFTNFLITISSHVGLAFTSYSATTSALGLPFVWR
PAFSFIIAFMTVMGMTIAFAKDISDIEGDAKYGVSTVATKLGARNMTFV
VSGVLLLNYLVSISIGIIWPQVFKSNIMILSHAILAFCLIFQTRELALA
NYASAPSRQFFEFIWLLYYAEYFVYVFI.

[0168] In some embodiments, a truncated CsPT4 is provided by SEQ ID NO: 7.

(SEQ ID NO: 7)
IEGSPHHESDNSIATKILNFGHTCWKLQRPYVVKGMISIACGLFGRELF
NNRHLFSWGLMWKAFFALVPILSFNFFAAIMNQIYDVDIDRINKPDLPL
VSGEMSIETAWILSIIVALTGLIVTIKLKSAPLFVFIYIFGIFAGFAYS
VPPIRWKQYPFTNFLITISSHVGLAFTSYSATTSALGLPFVWRPAFSFI
IAFMTVMGMTIAFAKDISDIEGDAKYGVSTVATKLGARNMTFVVSGVLL
LNYLVSISIGIIWPQVFKSNIMILSHAILAFCLIFQTRELALANYASAP
SRQFFEFIWLLYYAEYFVYVFI.

[0169] In some embodiments, a truncated CsPT4 is provided by SEQ ID NO: 8.

(SEQ ID NO: 8)
HHESDNSIATKILNFGHTCWKLQRPYVVKGMISIACGLFGRELFNNRHL
FSWGLMWKAFFALVPILSFNFFAAIMNQIYDVDIDRINKPDLPLVSGEM
SIETAWILSIIVALTGLIVTIKLKSAPLFVFIYIFGIFAGFAYSVPPIR
WKQYPFTNFLITISSHVGLAFTSYSATTSALGLPFVWRPAFSFIIAFMT
VMGMTIAFAKDISDIEGDAKYGVSTVATKLGARNMTFVVSGVLLLNYLV
SISIGIIWPQVFKSNIMILSHAILAFCLIFQTRELALANYASAPSRQFF
EFIWLLYYAEYFVYVFI.

[0170] In some embodiments, a PT is CsPT6, which is provided by SEQ ID NO: 9, corresponding to UniProt Accession No. A0A455ZIL7.

(SEQ ID NO: 9)
SSDLPSVLSKGGSNWRRCNLKNVEFSGSYVAYNVSRLRVWKVREKPCSA
VFQPSSLKHCAKGSETFVFYQRPNERFLVKAAGGQPLESEPKNDMNSAK
DALDAFYRFSRPHTVIGTALSIVSVSLLAIEKLSDFSPLFFVGMLEAIV
AALLMNIYIVGLNQLYDIDIDKVNKPYLPLASGEYSIQTGVMIVASFSI
LSFGVGWLVGSWPLFWALFISFVLGTAYSINVPLLRWKRFALVAAMCIL
AVRAVIVQLAFFLHIQTHVFKRPAVFSRPLIFATAFMSFFSVVIALFKD
IPDIDGDRIYGIRSFTVRLGQKRVFWICISLLEIAYTVALLVGASSGFL
WSKVVTVLGHTILASILWTNAKSVDLSSKAAITSFYMFIWKLFYAEYLL
IPLVR.

[0171] In other embodiments, a PT is a truncated CsPT6. In some embodiments, a truncated CsPT6 is provided by SEQ ID NO: 701.

(SEQ ID NO: 701)
MSYVAYNVSRLRVWKVREKPCSAVFQPSSLKHCAKGSETFVFYQRPNER
FLVKAAGGQPLESEPKNDMNSAKDALDAFYRFSRPHTVIGTALSIVSVS
LLAIEKLSDFSPLFFVGMLEAIVAALLMNIYIVGLNQLYDIDIDKVNKP
YLPLASGEYSIQTGVMIVASFSILSFGVGWLVGSWPLFWALFISFVLGT
AYSINVPLLRWKRFALVAAMCILAVRAVIVQLAFFLHIQTHVFKRPAVF
SRPLIFATAFMSFFSVVIALFKDIPDIDGDRIYGIRSFTVRLGQKRVFW
ICISLLEIAYTVALLVGASSGFLWSKVVTVLGHTILASILWTNAKSVDL
SSKAAITSFYMFIWKLFYAEYLLIPLVR.

[0172] In some embodiments, a PT is CsPT7, which is provided by SEQ ID NO: 10, corresponding to UniProt Accession No. A0A455ZJ77.

MELSSICNFSFQTNYHTLLNPHNKNPKSSLLSHQHPKTPIITSSYNNFP
SNYCSNKNFHLQNRCSKSLLIAKNSIRTDTANQTEPPESNTKYSVVTKI
LSFGHTCWKLQRPYTFIGVISCACGLFGRELFHNTNLLSWSLMLKAFSS
LMVILSVNLCTNIINQITDLDIDRINKPDLPLASGEMSIETAWIMSIIV
ALTGLILTIKLNCGPLFISLYCVSILVGALYSVPPFRWKQNPNTAFSSY
FMGLVIVNFTCYYASRAAFGLPFEMSPPFTFILAFVKSMGSALFLCKDV
SDIEGDSKHGISTLATRYGAKNITFLCSGIVLLTYVSAILAAIIWPQAF
KSNVMLLSHATLAFWLIFQTREFALTNYNPEAGRKFYEFMWKLHYAEYL
VYVFI.

[0173] In other embodiments, a CsPT is a truncated CsPT7. In some embodiments, a truncated CsPT7 is provided by SEQ ID NO: 702

(SEQ ID NO: 702)
MSTDTANQTEPPESNTKYSVVTKILSFGHTCWKLQRPYTFIGVISCACG
LFGRELFHNTNLLSWSLMLKAFSSLMVILSVNLCTNIINQITDLDIDRI
NKPDLPLASGEMSIETAWIMSIIVALTGLILTIKLNCGPLFISLYCVSI
LVGALYSVPPFRWKQNPNTAFSSYFMGLVIVNFTCYYASRAAFGLPFEM
SPPFTFILAFVKSMGSALFLCKDVSDIEGDSKHGISTLATRYGAKNITF
LCSGIVLLTYVSAILAAIIWPQAFKSNVMLLSHATLAFWLIFQTREFAL
TNYNPEAGRKFYEFMWKLHYABYLVYVFI.

a. Chimeric Prenyltransferase

[0174] Examples 1-8 describe identification of synthetic PTs that can be functionally expressed in host cells such as S. cerevisiae. Nucleic acid and protein sequences for PTs identified in this application are provided in Tables 13-16 and 19-20.

[0175] PTs provided in this disclosure include chimeric PTs. As used in this disclosure, a “chimeric PT” refers to a PT that includes one or more portions of at least two different PT proteins. It has previously been reported that it is difficult to express C. sativa PTs in S. cerevisiae; for example, out of CsPT1-7, only CsPT4 was reported to produce CBGA when expressed heterologously in S. cerevisiae, and only at low titers (Luo et al., Nature 2019 March; 567(7746):123-126). It was surprisingly shown in Examples 1-8 of this disclosure that chimeric PTs, such as PTs that included portions of at least two of CsPT1, CsPT4, CsPT6, and CsPT7, were able to produce CBGA and/or CBGVA.

[0176] In some embodiments, chimeric PTs comprise one or more portions of CsPT1 and one or more portions of a non-CsPT1 PT. A portion can include, for example, 5, 6, 7, 8, 9, 10, 11, 12, 13, 14, 15, 16, 17, 18, 19, 20, 21, 22, 23, 24, 25, 26, 27, 28, 29, 30, 31, 32, 33, 34, 35, 36, 37, 38, 39, 40, 41, 42, 43, 44, 45, 46, 47, 48, 49, 50, 51, 52, 53, 54, 55, 56, 57, 58, 59, 60, 61, 62, 63, 64, 65, 66, 67, 68, 69, 70, 71, 72, 73, 74, 75, 76, 77, 78, 79, 80, 81, 82, 83, 84, 85, 86, 87, 88, 89, 90, 91, 92, 93, 94, 95, 96, 97, 98, 99, 100, 101, 102, 103, 104, 105, 106, 107, 108, 109, 110, 111, 112, 113, 114, 115, 116, 117, 118, 119, 120, 121, 122, 123, 124, 125, 126, 127, 128, 129, 130, 131, 132, 133, 134, 135, 136, 137, 138, 139, 140, 141, 142, 143, 144, 145, 146, 147, 148, 149, 150, 151, 152, 153, 154, 155, 156, 157, 158, 159, 160, 161, 162, 163, 164, 165, 166, 167, 168, 169, 170, 171, 172, 173, 174, 175, 176, 177, 178, 179, 180, 181, 182, 183, 184, 185, 186, 187, 188, 189, 190, 191, 192, 193, 194, 195, 196, 197, 198, 199, 200, 201, 202, 203, 204, 205, 206, 207, 208, 209, 210, 211, 212, 213, 214, 215, 216, 217, 218, 219, 220, 221, 222, 223, 224, 225, 226, 227, 228, 229, 230, 231, 232, 233, 234, 235, 236, 237, 238, 239, 240, 241, 242, 243, 244, 245, 246, 247, 248, 249, 250, 251, 252, 253, 254, 255, 256, 257, 258, 259, 260, 261, 262, 263, 264, 265, 266, 267, 268, 269, 270, 271, 272, 273, 274, 275, 276, 277, 278, 279, 280, 281, 282, 283, 284, 285, 286, 287, 288, 289, 290, 291, 292, 293, 294, 295, 296, 297, 298, 299, 300, 301, 302, 303, 304, 305, 306, 307, 308, 309, 310, 311, 312, 313, 314, 315, 316, 317, 318, 319, 320, 321, 322, 323, 324, 325, 326, 327, 328, 329, 330, 331, 332, 333, 334, 335, 336, 337, 338, 339, 340, 341, 342, 343, 344, 345, 346, 347, 348, 349, 350, 351, 352, 353, 354, 355, 356, 357, 358, 359, 360, 361, 362, 363, 364, 365, 366, 367, 368, 369, 370, 371, 372, 373, 374, 375, 376, 377, 378, 379, 380, 381, 382, 383, 384, 385, 386, 387, 388, 389, 390, or more than 390 amino acids. In some embodiments, a non-CsPT1 PT is a PT from C. sativa. In some embodiments, a non-CsPT1 PT is CsPT4, CsPT6, or CsPT7.

[0177] In some embodiments, chimeric PTs comprise one or more portions of CsPT4 and one or more portions of a non-CsPT4 PT. A portion can include, for example, 5, 6, 7, 8, 9, 10, 11, 12, 13, 14, 15, 16, 17, 18, 19, 20, 21, 22, 23, 24, 25, 26, 27, 28, 29, 30, 31, 32, 33, 34, 35, 36, 37, 38, 39, 40, 41, 42, 43, 44, 45, 46, 47, 48, 49, 50, 51, 52, 53, 54, 55, 56, 57, 58, 59, 60, 61, 62, 63, 64, 65, 66, 67, 68, 69, 70, 71, 72, 73, 74, 75, 76, 77, 78, 79, 80, 81, 82, 83, 84, 85, 86, 87, 88, 89, 90, 91, 92, 93, 94, 95, 96, 97, 98, 99, 100, 101, 102, 103, 104, 105, 106, 107, 108, 109, 110, 111, 112, 113, 114, 115, 116, 117, 118, 119, 120, 121, 122, 123, 124, 125, 126, 127, 128, 129, 130, 131, 132, 133, 134, 135, 136, 137, 138, 139, 140, 141, 142, 143, 144, 145, 146, 147, 148, 149, 150, 151, 152, 153, 154, 155, 156, 157, 158, 159, 160, 161, 162, 163, 164, 165, 166, 167, 168, 169, 170, 171, 172, 173, 174, 175, 176, 177, 178, 179, 180, 181, 182, 183, 184, 185, 186, 187, 188, 189, 190, 191, 192, 193, 194, 195, 196, 197, 198, 199, 200, 201, 202, 203, 204, 205, 206, 207, 208, 209, 210, 211, 212, 213, 214, 215, 216, 217, 218, 219, 220, 221, 222, 223, 224, 225, 226, 227, 228, 229, 230, 231, 232, 233, 234, 235, 236, 237, 238, 239, 240, 241, 242, 243, 244, 245, 246, 247, 248, 249, 250, 251, 252, 253, 254, 255, 256, 257, 258, 259, 260, 261, 262, 263, 264, 265, 266, 267, 268, 269, 270, 271, 272, 273, 274, 275, 276, 277, 278, 279, 280, 281, 282, 283, 284, 285, 286, 287, 288, 289, 290, 291, 292, 293, 294, 295, 296, 297, 298, 299, 300, 301, 302, 303, 304, 305, 306, 307, 308, 309, 310, 311, 312, 313, 314, 315, 316, 317, 318, 319, 320, 321, 322, 323, 324, 325, 326, 327, 328, 329, 330, 331, 332, 333, 334, 335, 336, 337, 338, 339, 340, 341, 342, 343, 344, 345, 346, 347, 348, 349, 350, 351, 352, 353, 354, 355, 356, 357, 358, 359, 360, 361, 362, 363, 364, 365, 366, 367, 368, 369, 370, 371, 372, 373, 374, 375, 376, 377, 378, 379, 380, 381, 382, 383, 384, 385, 386, 387, 388, 389, 390, or more than 390 amino acids. In some embodiments, a non-CsPT4 PT is a PT from C. sativa. In some embodiments, a non-CsPT4 PT is CsPT1, CsPT6, or CsPT7.

[0178] In some embodiments, chimeric PTs comprise one or more portions of CsPT6 and one or more portions of a non-CsPT6 PT. A portion can include, for example, 5, 6, 7, 8, 9, 10, 11, 12, 13, 14, 15, 16, 17, 18, 19, 20, 21, 22, 23, 24, 25, 26, 27, 28, 29, 30, 31, 32, 33, 34, 35, 36, 37, 38, 39, 40, 41, 42, 43, 44, 45, 46, 47, 48, 49, 50, 51, 52, 53, 54, 55, 56, 57, 58, 59, 60, 61, 62, 63, 64, 65, 66, 67, 68, 69, 70, 71, 72, 73, 74, 75, 76, 77, 78, 79, 80, 81, 82, 83, 84, 85, 86, 87, 88, 89, 90, 91, 92, 93, 94, 95, 96, 97, 98, 99, 100, 101, 102, 103, 104, 105, 106, 107, 108, 109, 110, 111, 112, 113, 114, 115, 116, 117, 118, 119, 120, 121, 122, 123, 124, 125, 126, 127, 128, 129, 130, 131, 132, 133, 134, 135, 136, 137, 138, 139, 140, 141, 142, 143, 144, 145, 146, 147, 148, 149, 150, 151, 152, 153, 154, 155, 156, 157, 158, 159, 160, 161, 162, 163, 164, 165, 166, 167, 168, 169, 170, 171, 172, 173, 174, 175, 176, 177, 178, 179, 180, 181, 182, 183, 184, 185, 186, 187, 188, 189, 190, 191, 192, 193, 194, 195, 196, 197, 198, 199, 200, 201, 202, 203, 204, 205, 206, 207, 208, 209, 210, 211, 212, 213, 214, 215, 216, 217, 218, 219, 220, 221, 222, 223, 224, 225, 226, 227, 228, 229, 230, 231, 232, 233, 234, 235, 236, 237, 238, 239, 240, 241, 242, 243, 244, 245, 246, 247, 248, 249, 250, 251, 252, 253, 254, 255, 256, 257, 258, 259, 260, 261, 262, 263, 264, 265, 266, 267, 268, 269, 270, 271, 272, 273, 274, 275, 276, 277, 278, 279, 280, 281, 282, 283, 284, 285, 286, 287, 288, 289, 290, 291, 292, 293, 294, 295, 296, 297, 298, 299, 300, 301, 302, 303, 304, 305, 306, 307, 308, 309, 310, 311, 312, 313, 314, 315, 316, 317, 318, 319, 320, 321, 322, 323, 324, 325, 326, 327, 328, 329, 330, 331, 332, 333, 334, 335, 336, 337, 338, 339, 340, 341, 342, 343, 344, 345, 346, 347, 348, 349, 350, 351, 352, 353, 354, 355, 356, 357, 358, 359, 360, 361, 362, 363, 364, 365, 366, 367, 368, 369, 370, 371, 372, 373, 374, 375, 376, 377, 378, 379, 380, 381, 382, 383, 384, 385, 386, 387, 388, 389, 390, or more than 390 amino acids. In some embodiments, a non-CsPT6 PT is a PT from C. sativa. In some embodiments, anon-CsPT6 PT is CsPT1, CsPT4, or CsPT7.

[0179] In some embodiments, chimeric PTs comprise one or more portions of CsPT7 and one or more portions of a non-CsPT7 PT. A portion can include, for example, 5, 6, 7, 8, 9, 10, 11, 12, 13, 14, 15, 16, 17, 18, 19, 20, 21, 22, 23, 24, 25, 26, 27, 28, 29, 30, 31, 32, 33, 34, 35, 36, 37, 38, 39, 40, 41, 42, 43, 44, 45, 46, 47, 48, 49, 50, 51, 52, 53, 54, 55, 56, 57, 58, 59, 60, 61, 62, 63, 64, 65, 66, 67, 68, 69, 70, 71, 72, 73, 74, 75, 76, 77, 78, 79, 80, 81, 82, 83, 84, 85, 86, 87, 88, 89, 90, 91, 92, 93, 94, 95, 96, 97, 98, 99, 100, 101, 102, 103, 104, 105, 106, 107, 108, 109, 110, 111, 112, 113, 114, 115, 116, 117, 118, 119, 120, 121, 122, 123, 124, 125, 126, 127, 128, 129, 130, 131, 132, 133, 134, 135, 136, 137, 138, 139, 140, 141, 142, 143, 144, 145, 146, 147, 148, 149, 150, 151, 152, 153, 154, 155, 156, 157, 158, 159, 160, 161, 162, 163, 164, 165, 166, 167, 168, 169, 170, 171, 172, 173, 174, 175, 176, 177, 178, 179, 180, 181, 182, 183, 184, 185, 186, 187, 188, 189, 190, 191, 192, 193, 194, 195, 196, 197, 198, 199, 200, 201, 202, 203, 204, 205, 206, 207, 208, 209, 210, 211, 212, 213, 214, 215, 216, 217, 218, 219, 220, 221, 222, 223, 224, 225, 226, 227, 228, 229, 230, 231, 232, 233, 234, 235, 236, 237, 238, 239, 240, 241, 242, 243, 244, 245, 246, 247, 248, 249, 250, 251, 252, 253, 254, 255, 256, 257, 258, 259, 260, 261, 262, 263, 264, 265, 266, 267, 268, 269, 270, 271, 272, 273, 274, 275, 276, 277, 278, 279, 280, 281, 282, 283, 284, 285, 286, 287, 288, 289, 290, 291, 292, 293, 294, 295, 296, 297, 298, 299, 300, 301, 302, 303, 304, 305, 306, 307, 308, 309, 310, 311, 312, 313, 314, 315, 316, 317, 318, 319, 320, 321, 322, 323, 324, 325, 326, 327, 328, 329, 330, 331, 332, 333, 334, 335, 336, 337, 338, 339, 340, 341, 342, 343, 344, 345, 346, 347, 348, 349, 350, 351, 352, 353, 354, 355, 356, 357, 358, 359, 360, 361, 362, 363, 364, 365, 366, 367, 368, 369, 370, 371, 372, 373, 374, 375, 376, 377, 378, 379, 380, 381, 382, 383, 384, 385, 386, 387, 388, 389, 390, or more than 390 amino acids. In some embodiments, a non-CsPT7 PT is a PT from C. sativa. In some embodiments, a non-CsPT7 PT is CsPT1, CsPT4, or CsPT6.

[0180] As described in Example 1 and FIG. 7, two different approaches were pursued for developing chimeric PTs based on where the cross-over points between different PT proteins occurred. As used in this disclosure, a “cross-over point” for a chimeric PT that contains portions of proteins “A” and “B” refers to the position where the sequence of the chimeric PT changes from protein A to B or vice versa. As discussed in Example 1 and as shown in FIG. 7, chimeric PTs can be generated using a “within membrane” approach or a “through membrane” approach. An example of a chimeric PT generated using a “within membrane” approach is shown in FIG. 7A. In this approach, the one or more cross-over points in the chimeric PT occur within the transmembrane helices of the chimeric PT. A “through membrane approach” is shown in FIG. 7B. In this approach, the one or more cross-over points in the chimeric PT occur outside of the transmembrane helices of the chimeric PT. For example, in FIG. 7B one single cross-over point is shown between helices 6&7 of the chimeric PT protein. Cross-over points can also occur between other helices, such as between helices 7&8 or 8&9.

[0181] Chimeric PTs associated with the disclosure include multiple transmembrane helices. As used in this disclosure, “multiple” transmembrane helices refers to more than one transmembrane helix. In some embodiments, chimeric PTs include 6, 7, 8, 9, 10, 11, 12, 13, 14, 15 or more than 15 transmembrane helices. In some embodiments, chimeric PTs include 9 transmembrane helices.

[0182] In some embodiments, at least one transmembrane helix includes both a portion of CsPT1 and a portion of a non-CsPT1 PT. In some embodiments, the non-CsPT1 PT is a PT from C. sativa. In some embodiments, the non-CsPT1 PT is CsPT4, CsPT6 or CsPT7. In some embodiments, all the transmembrane helices comprise both a portion of CsPT1 and a portion of a non-CsPT1 PT. In some embodiments, all the transmembrane helices comprise both a portion of CsPT1 and a portion of CsPT4, CsPT6 or CsPT7.

[0183] In some embodiments, at least one transmembrane helix includes both a portion of CsPT4 and a portion of a non-CsPT4 PT. In some embodiments, the non-CsPT4 PT is a PT from C. sativa. In some embodiments, the non-CsPT4 PT is CsPT1, CsPT6 or CsPT7. In some embodiments, all the transmembrane helices comprise both a portion of CsPT4 and a portion of a non-CsPT4 PT. In some embodiments, all the transmembrane helices comprise both a portion of CsPT4 and a portion of CsPT1, CsPT6 or CsPT7.

[0184] In some embodiments, at least one transmembrane helix includes both a portion of CsPT6 and a portion of a non-CsPT6 PT. In some embodiments, the non-CsPT6 PT is a PT from C. sativa. In some embodiments, the non-CsPT6 PT is CsPT1, CsPT4 or CsPT7. In some embodiments, all the transmembrane helices comprise both a portion of CsPT6 and a portion of a non-CsPT6 PT. In some embodiments, all the transmembrane helices comprise both a portion of CsPT6 and a portion of CsPT1, CsPT4 or CsPT7.

[0185] In some embodiments, at least one transmembrane helix includes both a portion of CsPT7 and a portion of a non-CsPT7 PT. In some embodiments, the non-CsPT7 PT is a PT from C. sativa. In some embodiments, the non-CsPT7 PT is CsPT1, CsPT4 or CsPT6. In some embodiments, all the transmembrane helices comprise both a portion of CsPT7 and a portion of a non-CsPT7 PT. In some embodiments, all the transmembrane helices comprise both a portion of CsPT7 and a portion of CsPT1, CsPT4 or CsPT6.

[0186] As one of ordinary skill in the art would appreciate, multiple different computational analysis programs may be used to determine secondary structures in proteins, such as CsPT proteins. Different computational analysis programs may define the boundaries of the secondary structures differently. For example, the Uniprot entry AOA455ZJC3 (corresponding to CsPT4) uses Phobius to predict that there are 8 sequences therewithin that are highly probable to be transmembrane helices. There is also a portion of the sequence with lower probability to be a transmembrane domain that is not listed on the Uniprot entry. As a comparison, for Uniprot entry 028625, which is a protein with the highest sequence identity to CsPT4 for which there is a crystal structure (ex. pdbID: 4tq3), the Uniprot entry similarly indicates that there are 8 transmembrane helices, while the structure itself shows 9 transmembrane helices. Without being bound by any theory, the lower probability transmembrane domain helix of CsPTs may be an actual transmembrane domain helix that did not meet an arbitrary probability threshold for annotation on UniProt based on the software prediction.

[0187] Table 2 provides a non-limiting example of predicted domains within CsPT1-CsPT7. “Inner” means inside the cell, “membrane” means in the cell membrane, and “outer” means outside the cell.

TABLE 2
Predicted domains within CsPT1-CsPT7

| Domain | CsPT1 | CsPT2 | CsPT3 | CsPT4 | CsPT5 | CsPT6 | CsPT7 |
|---|---|---|---|---|---|---|---|
| 1 | Inner, | Inner, | Inner, | Inner, | Inner, | Inner, | Inner, |
| | 1-35 | 1-34 | 1-94 | 1-37 | 1-34 | 1-85 | 1-37 |
| 2 | Membrane, | Membrane, | Membrane, | Membrane, | Membrane, | Membrane, | Membrane, |
| | 36-53 | 35-51 | 95-111 | 38-55 | 35-54 | 86-102 | 38-55 |
| 3 | Outer, | Outer, | Outer, | Outer, | Outer, | Outer, | Outer, |
| | 54-57 | 52-59 | 112-125 | 56-69 | 55-62 | 103-110 | 56-69 |
| 4 | Membrane, | Membrane, | Membrane, | Membrane, | Membrane, | Membrane, | Membrane, |
| | 68-84 | 60-82 | 126-143 | 70-87 | 63-80 | 111-133 | 70-87 |
| 5 | Inner, | Inner, | Inner, | Inner, | Inner, | Inner, | Inner, |
| | 86-111 | 83-108 | 144-169 | 88-113 | 81-106 | 134-159 | 88-113 |
| 6 | Membrane, | Membrane, | Membrane, | Membrane, | Membrane, | Membrane, | Membrane, |
| | 112-129 | 109-128 | 170-188 | 114-131 | 107-125 | 160-179 | 114-131 |
| 7 | Outer, | Outer, | Outer, | Outer, | Outer, | Outer, | Outer, |
| | 130-135 | 129-132 | 189-196 | 132-137 | 126-129 | 180-183 | 132-137 |
| 8 | Membrane, | Membrane, | Membrane, | Membrane, | Membrane, | Membrane, | Membrane, |
| | 136-153 | 133-150 | 197-214 | 138-155 | 130-149 | 184-201 | 138-155 |
| 9 | Inner, | Inner, | Inner, | Inner, | Inner, | Inner, | Inner, |
| | 154-165 | 151-158 | 215-226 | 156-167 | 150-157 | 202-209 | 156-167 |
| 10 | Membrane, | Membrane, | Membrane, | Membrane, | Membrane, | Membrane, | Membrane, |
| | 166-183 | 159-181 | 227-246 | 168-192 | 158-177 | 210-232 | 168-185 |
| 11 | Outer, | Outer, | Outer, | Outer, | Outer, | Outer, | Outer, |
| | 184-197 | 182-197 | 247-254 | 193-198 | 178-189 | 233-248 | 186-199 |
| 12 | Membrane, | Membrane, | Membrane, | Membrane. | Membrane, | Membrane, | Membrane, |
| | 200-215 | 198-215 | 255-272 | 199-216 | 190-209 | 249-266 | 200-217 |
| 13 | Inner, | Inner, | Inner, | Inner, | Inner, | Inner, | Inner, |
| | 216-241 | 216-241 | 273-298 | 217-244 | 210-237 | 267-292 | 218-243 |
| 14 | Membrane, | Membrane, | Membrane, | Membrane, | Membrane, | Membrane, | Membrane, |
| | 242-259 | 242-261 | 299-320 | 245-264 | 238-257 | 293-312 | 244-263 |
| 15 | Outer, | Outer, | Outer, | Outer, | Outer, | Outer, | Outer, |
| | 260-265 | 262-269 | 321-328 | 265-270 | 258-265 | 313-320 | 264-267 |
| 16 | Membrane, | Membrane, | Membrane, | Membrane, | Membrane, | Membrane, | Membrane, |
| | 266-284 | 270-287 | 329-348 | 271-288 | 266-285 | 321-338 | 268-287 |
| 17 | Inner, | Inner, | Inner, | Inner, | Inner, | Inner, | Inner, |
| | 285-302 | 288-299 | 349-360 | 289-304 | 286-293 | 339-350 | 288-304 |
| 18 | Membrane, | Membrane, | Membrane, | Membrane, | Membrane, | Membrane, | Membrane, |
| | 303-320 | 300-319 | 361-378 | 305-322 | 294-313 | 351-370 | 305-322 |
| 19 | Outer, | Outer, | Outer, | Outer, | Outer, | Outer, | Outer, |
| | 321 | 320 | 379 | 323 | 314-316 | 371 | 323 |

[0188] In some embodiments, a chimeric PT comprises portions of 1, 2, 3, 4, 5, 6, 7, or more than 7 different PTs. In some embodiments, the chimeric PT comprises one or more portions of CsPT1 and one or more portions of CsPT2, CsPT3, CsPT4, CsPT5, CsPT6, or CsPT7. In some embodiments, the chimeric PT comprises one or more portions of CsPT1 and one or more portions of CsPT4. In some embodiments, the chimeric PT comprises one or more portions of CsPT1 and one or more portions of CsPT6. In some embodiments, the chimeric PT comprises one or more portions of CsPT1 and one or more portions of CsPT7. In some embodiments, the chimeric PT comprises one or more portions of CsPT1, one or more portions of CsPT4, one or more portions of CsPT6, and/or one or more portions of CsPT7.

[0189] In some embodiments, the chimeric PT comprises one or more portions of CsPT4 and one or more portions of CsPT1, CsPT2, CsPT3, CsPT5, CsPT6 or CsPT7. In some embodiments, the chimeric PT comprises one or more portions of CsPT4 and one or more portions of CsPT1. In some embodiments, the chimeric PT comprises one or more portions of CsPT4 and one or more portions of CsPT6. In some embodiments, the chimeric PT comprises one or more portions of CsPT4 and one or more portions of CsPT7. In some embodiments, the chimeric PT comprises one or more portions of CsPT4, one or more portions of CsPT1, one or more portions of CsPT6, and/or one or more portions of CsPT7.

[0190] In some embodiments, the chimeric PT comprises one or more portions of CsPT6 and one or more portions of CsPT1, CsPT2, CsPT3, CsPT4, CsPT5 or CsPT7. In some embodiments, the chimeric PT comprises one or more portions of CsPT6 and one or more portions of CsPT1. In some embodiments, the chimeric PT comprises one or more portions of CsPT6 and one or more portions of CsPT4. In some embodiments, the chimeric PT comprises one or more portions of CsPT6 and one or more portions of CsPT7. In some embodiments, the chimeric PT comprises one or more portions of CsPT6, one or more portions of CsPT1, one or more portions of CsPT4, and/or one or more portions of CsPT7.

[0191] In some embodiments, the chimeric PT comprises one or more portions of CsPT7 and one or more portions of CsPT1, CsPT2, CsPT3, CsPT4, CsPT5 or CsPT6. In some embodiments, the chimeric PT comprises one or more portions of CsPT7 and one or more portions of CsPT1. In some embodiments, the chimeric PT comprises one or more portions of CsPT7 and one or more portions of CsPT4. In some embodiments, the chimeric PT comprises one or more portions of CsPT7 and one or more portions of CsPT6. In some embodiments, the chimeric PT comprises one or more portions of CsPT7, one or more portions of CsPT1, one or more portions of CsPT4, and/or one or more portions of CsPT6.

[0192] In some embodiments, at least 5%, 6%, 7%, 8%, 9%, 10%, 11%, 12%, 13%, 14%, 15%, 16%, 17%, 18%, 19%, 20%, 21%, 22%, 23%, 24%, 25%, 26%, 27%, 28%, 29%, 30%, 31%, 32%, 33%, 34%, 35%, 36%, 37%, 38%, 39%, 40%, 41%, 42%, 43%, 44%, 45%, 46%, 47%, 48%, 49%, 50%, 51%, 52%, 53%, 54%, 55%, 56%, 57%, 58%, 59%, 60%, 61%, 62%, 63%, 64%, 65%, 66%, 67%, 68%, 69%, 70%, 71%, 72%, 73%, 74%, 75%, 76%, 77%, 78%, 79%, 80%, 81%, 82%, 83%, 84%, 85%, 86%, 87%, 88%, 89%, 90%, 91%, 92%, 93%, 94%, or 95% of a chimeric PT is derived from CsPT1. In some embodiments, at least 5%, 6%, 7%, 8%, 9%, 10%, 11%, 12%, 13%, 14%, 15%, 16%, 17%, 18%, 19%, 20%, 21%, 22%, 23%, 24%, 25%, 26%, 27%, 28%, 29%, 30%, 31%, 32%, 33%, 34%, 35%, 36%, 37%, 38%, 39%, 40%, 41%, 42%, 43%, 44%, 45%, 46%, 47%, 48%, 49%, 50%, 51%, 52%, 53%, 54%, 55%, 56%, 57%, 58%, 59%, 60%, 61%, 62%, 63%, 64%, 65%, 66%, 67%, 68%, 69%, 70%, 71%, 72%, 73%, 74%, 75%, 76%, 77%, 78%, 79%, 80%, 81%, 82%, 83%, 84%, 85%, 86%, 87%, 88%, 89%, 90%, 91%, 92%, 93%, 94%, or 95% of a transmembrane helix of a chimeric PT is derived from CsPT1.

[0193] In some embodiments, at least 5%, 6%, 7%, 8%, 9%, 10%, 11%, 12%, 13%, 14%, 15%, 16%, 17%, 18%, 19%, 20%, 21%, 22%, 23%, 24%, 25%, 26%, 27%, 28%, 29%, 30%, 31%, 32%, 33%, 34%, 35%, 36%, 37%, 38%, 39% 40%, 41%, 42%, 43%, 44%, 45%, 46%, 47%, 48%, 49%, 50%, 51%, 52%, 53%, 54%, 55%, 56%, 57%, 58%, 59%, 60%, 61%, 62%, 63%, 64%, 65%, 66%, 67%, 68%, 69%, 70%, 71%, 72%, 73%, 74%, 75%, 76%, 77%, 78%, 79%, 80%, 81%, 82%, 83%, 84%, 85%, 86%, 87%, 88%, 89%, 90%, 91%, 92%, 93%, 94%, or 95% of a chimeric PT is derived from CsPT2. In some embodiments, at least 5%, 6%, 7%, 8%, 9%, 10%, 11%, 12%, 13%, 14%, 15%, 16%, 17%, 18%, 19%, 20%, 21%, 22%, 23%, 24%, 25%, 26%, 27%, 28%, 29%, 30%, 31%, 32%, 33%, 34%, 35%, 36%, 37%, 38%, 39%, 40%, 41%, 42%, 43%, 44%, 45%, 46%, 47%, 48%, 49%, 50%, 51%, 52%, 53%, 54%, 55%, 56%, 57%, 58%, 59%, 60%, 61%, 62%, 63%, 64%, 65%, 66%, 67%, 68%, 69%, 70%, 71%, 72%, 73%, 74%, 75%, 76%, 77%, 78%, 79%, 80%, 81%, 82%, 83%, 84%, 85%, 86%, 87%, 88%, 89%, 90%, 91%, 92%, 93%, 94%, or 95% of a transmembrane helix of a chimeric PT is derived from CsPT2.

[0194] In some embodiments, at least 5%, 6%, 7%, 8%, 9%, 10%, 11%, 12%, 13%, 14%, 15%, 16%, 17%, 18%, 19%, 20%, 21%, 22%, 23%, 24%, 25%, 26%, 27%, 28%, 29%, 30%, 31%, 32%, 33%, 34%, 35%, 36%, 37%, 38%, 39%, 40%, 41%, 42%, 43%, 44%, 45%, 46%, 47%, 48%, 49%, 50%, 51%, 52%, 53%, 54%, 55%, 56%, 57%, 58%, 59%, 60%, 61%, 62%, 63%, 64%, 65%, 66%, 67%, 68%, 69%, 70%, 71%, 72%, 73%, 74%, 75%, 76%, 77%, 78%, 79%, 80%, 81%, 82%, 83%, 84%, 85%, 86%, 87%, 88%, 89%, 90%, 91%, 92%, 93%, 94%, or 95% of a chimeric PT is derived from CsPT3. In some embodiments, at least 5%, 6%, 7%, 8%, 9%, 10%, 11%, 12%, 13%, 14%, 15%, 16%, 17%, 18%, 19%, 20%, 21%, 22%, 23%, 24%, 25%, 26%, 27%, 28%, 29%, 30%, 31%, 32%, 33%, 34%, 35%, 36%, 37%, 38%, 39%, 40%, 41%, 42%, 43%, 44%, 45%, 46%, 47%, 48%, 49%, 50%, 51%, 52%, 53%, 54%, 55%, 56%, 57%, 58%, 59%, 60%, 61%, 62%, 63%, 64%, 65%, 66%, 67%, 68%, 69%, 70%, 71%, 72%, 73%, 74%, 75%, 76%, 77%, 78%, 79%, 80%, 81%, 82%, 83%, 84%, 85%, 86%, 87%, 88%, 89%, 90%, 91%, 92%, 93%, 94%, or 95% of a transmembrane helix of a chimeric PT is derived from CsPT3.

[0195] In some embodiments, at least 5%, 6%, 7%, 8%, 9%, 10%, 11%, 12%, 13%, 14%, 15%, 16%, 17%, 18%, 19%, 20%, 21%, 22%, 23%, 24%, 25%, 26%, 27%, 28%, 29%, 30%, 31%, 32%, 33%, 34%, 35%, 36%, 37%, 38%, 39%, 40%, 41%, 42%, 43%, 44%, 45%, 46%, 47%, 48%, 49%, 50%, 51%, 52%, 53%, 54%, 55%, 56%, 57%, 58%, 59%, 60%, 61%, 62%, 63%, 64%, 65%, 66%, 67%, 68%, 69%, 70%, 71%, 72%, 73%, 74%, 75%, 76%, 77%, 78%, 79%, 80%, 81%, 82%, 83%, 84%, 85%, 86%, 87%, 88%, 89%, 90%, 91%, 92%, 93%, 94%, or 95% of a chimeric PT is derived from CsPT4. In some embodiments, at least 5%, 6%, 7%, 8%, 9%, 10%, 11%, 12%, 13%, 14%, 15%, 16%, 17%, 18%, 19%, 20%, 21%, 22%, 23%, 24%, 25%, 26%, 27%, 28%, 29%, 30%, 31%, 32%, 33%, 34%, 35%, 36%, 37%, 38%, 39%, 40%, 41%, 42%, 43%, 44%, 45%, 46%, 47%, 48%, 49%, 50%, 51%, 52%, 53%, 54%, 55%, 56%, 57%, 58%, 59%, 60%, 61%, 62%, 63%, 64%, 65%, 66%, 67%, 68%, 69%, 70%, 71%, 72%, 73%, 74%, 75%, 76%, 77%, 78%, 79%, 80%, 81%, 82%, 83%, 84%, 85%, 86%, 87%, 88%, 89%, 90%, 91%, 92%, 93%, 94%, or 95% of a transmembrane helix of a chimeric PT is derived from CsPT4.

[0196] In some embodiments, at least 5%, 6%, 7%, 8%, 9%, 10%, 11%, 12%, 13%, 14%, 15%, 16%, 17%, 18%, 19%, 20%, 21%, 22%, 23%, 24%, 25%, 26%, 27%, 28%, 29%, 30%, 31%, 32%, 33%, 34%, 35%, 36%, 37%, 38%, 39%, 40%, 41%, 42%, 43%, 44% 45%, 46%, 47%, 48%, 49%, 50%, 51%, 52%, 53%, 54%, 55%, 56%, 57%, 58%, 59%, 60%, 61%, 62%, 63%, 64%, 65%, 66%, 67%, 68%, 69%, 70%, 71%, 72%, 73%, 74%, 75%, 76%, 77%, 78%, 79%, 80%, 81%, 82%, 83%, 84%, 85%, 86%, 87%, 88%, 89%, 90%, 91%, 92%, 93%, 94%, or 95% of a chimeric PT is derived from CsPT5. In some embodiments, at least 5%, 6%, 7%, 8%, 9%, 10%, 11%, 12%, 13%, 14%, 15%, 16%, 17%, 18%, 19%, 20%, 21%, 22%, 23%, 24%, 25%, 26%, 27%, 28%, 29%, 30%, 31%, 32%, 33%, 34%, 35%, 36%, 37%, 38%, 39%, 40%, 41%, 42%, 43%, 44%, 45%, 46%, 47%, 48%, 49%, 50%, 51%, 52%, 53%, 54%, 55%, 56%, 57%, 58%, 59%, 60%, 61%, 62%, 63%, 64%, 65%, 66%, 67%, 68%, 69%, 70%, 71%, 72%, 73%, 74%, 75%, 76%, 77%, 78%, 79%, 80%, 81%, 82%, 83%, 84%, 85%, 86%, 87%, 88%, 89%, 90%, 91%, 92%, 93%, 94%, or 95% of a transmembrane helix of a chimeric PT is derived from CsPT5.

[0197] In some embodiments, at least 5%, 6%, 7%, 8%, 9%, 10%, 11%, 12%, 13%, 14%, 15%, 16%, 17%, 18%, 19%, 20%, 21%, 22%, 23%, 24%, 25%, 26%, 27%, 28%, 29%, 30%, 31%, 32%, 33%, 34%, 35%, 36%, 37%, 38%, 39%, 40%, 41%, 42%, 43%, 44%, 45%, 46%, 47%, 48%, 49%, 50%, 51%, 52%, 53%, 54%, 55%, 56%, 57%, 58%, 59%, 60%, 61%, 62%, 63%, 64%, 65%, 66%, 67%, 68%, 69%, 70%, 71%, 72%, 73%, 74%, 75%, 76%, 77%, 78%, 79%, 80%, 81%, 82%, 83%, 84%, 85%, 86%, 87%, 88%, 89%, 90%, 91%, 92%, 93%, 94%, or 95% of a chimeric PT is derived from CsPT6. In some embodiments, at least 5%, 6%, 7%, 8%, 9%, 10%, 11%, 12%, 13%, 14%, 15%, 16%, 17%, 18%, 19%, 20%, 21%, 22%, 23%, 24%, 25%, 26%, 27%, 28%, 29%, 30%, 31%, 32%, 33%, 34%, 35%, 36%, 37%, 38%, 39%, 40%, 41%, 42%, 43%, 44%, 45%, 46%, 47%, 48%, 49%, 50%, 51%, 52%, 53%, 54%, 55%, 56%, 57%, 58%, 59%, 60%, 61%, 62%, 63%, 64%, 65%, 66%, 67%, 68%, 69%, 70%, 71%, 72%, 73%, 74%, 75%, 76%, 77%, 78%, 79%, 80%, 81%, 82%, 83%, 84%, 85%, 86%, 87%, 88%, 89%, 90%, 91%, 92%, 93%, 94%, or 95% of a transmembrane helix of a chimeric PT is derived from CsPT6.

[0198] In some embodiments, at least 5%, 6%, 7%, 8%, 9%, 10%, 11%, 12%, 13%, 14%, 15%, 16%, 17%, 18%, 19%, 20%, 21%, 22%, 23%, 24%, 25%, 26%, 27%, 28%, 29%, 30%, 31%, 32%, 33%, 34%, 35%, 36%, 37%, 38%, 39%, 40%, 41%, 42%, 43%, 44%, 45%, 46%, 47%, 48%, 49%, 50%, 51%, 52%, 53%, 54%, 55%, 56%, 57%, 58%, 59%, 60%, 61%, 62%, 63%, 64%, 65%, 66%, 67%, 68%, 69%, 70%, 71%, 72%, 73%, 74%, 75%, 76%, 77%, 78%, 79%, 80%, 81%, 82%, 83%, 84%, 85%, 86%, 87%, 88%, 89%, 90%, 91%, 92%, 93%, 94%, or 95% of a chimeric PT is derived from CsPT7. In some embodiments, at least 5%, 6%, 7%, 8%, 9%, 10%, 11%, 12%, 13%, 14%, 15%, 16%, 17%, 18%, 19%, 20%, 21%, 22%, 23%, 24%, 25%, 26%, 27%, 28%, 29%, 30%, 31%, 32%, 33%, 34%, 35%, 36%, 37%, 38%, 39%, 40%, 41%, 42%, 43%, 44%, 45%, 46%, 47%, 48%, 49%, 50%, 51%, 52%, 53%, 54%, 55%, 56%, 57%, 58%, 59%, 60%, 61%, 62%, 63%, 64%, 65%, 66%, 67%, 68%, 69%, 70%, 71%, 72%, 73%, 74%, 75%, 76%, 77%, 78%, 79%, 80%, 81%, 82%, 83%, 84%, 85%, 86%, 87%, 88%, 89%, 90%, 91%, 92%, 93%, 94%, or 95% of a transmembrane helix of a chimeric PT is derived from CsPT7.

[0199] In some embodiments, a chimeric PT comprises all or part of the active site of CsPT1. In some embodiments, a chimeric PT comprises all or part of the active site of CsPT2. In some embodiments, a chimeric PT comprises all or part of the active site of CsPT3. In some embodiments, a chimeric PT comprises all or part of the active site of CsPT4. In some embodiments, a chimeric PT comprises all or part of the active site of CsPT5. In some embodiments, a chimeric PT comprises all or part of the active site of CsPT6. In some embodiments, a chimeric PT comprises all or part of the active site of CsPT7.

[0200] In some embodiments, a chimeric PT includes one or more of the following motifs: MTVMGMT (SEQ ID NO; 11); [EV][LMW][RS]P[SAP]F[ST]F[IL][IL]AF (SEQ ID NO: 12); QFFEFIW (SEQ ID NO: 13); HNTNL (SEQ ID NO: 14); TCWKL (SEQ ID NO: 15); M[IL]LSHAILAFC (SEQ ID NO: 16); HVG[LV][AN]FT[SCF]Y[YS]A[ST][RT][AS]A[LF] (SEQ ID NO; 17); GLIVT (SEQ ID NO: 18); L[YH]YAEY[LF]V (SEQ ID NO: 19); KAFFAL (SEQ ID NO: 20); KLGARNMT (SEQ ID NO: 21); QAF[NK]SN (SEQ ID NO: 22); LIFQT (SEQ ID NO: 23); SIIVALT (SEQ ID NO: 24); MSIETAW (SEQ ID NO: 25); VVSGV (SEQ ID NO: 26); RPYVV (SEQ ID NO: 27); KPDLP (SEQ ID NO: 28); RWKQY (SEQ ID NO: 29); FLITI (SEQ ID NO: 30); DIEGD (SEQ ID NO: 31); and KYGVST (SEQ ID NO: 32).

[0201] In some embodiments, motifs identified in this disclosure are located at chimeric junctions. Chimeric junctions refer to crossover points in a chimeric sequence. For example, in a chimeric PT that includes portions of CsPT4 and portions of CsPT7, a chimeric junction occurs at a region where a sequence derived from CsPT4 is joined to a sequence derived from CsPT7. A motif located at a chimeric junction therefore includes sequences derived from two or more CsPT proteins.

[0202] In some embodiments, a chimeric PT includes the motif MTVMGMT (SEQ ID NO: 11) at or near a chimeric junction. In some embodiments, a chimeric PT includes the motif MTVMGMT (SEQ ID NO: 11) at residues corresponding to residues 207-213 in SEQ ID NO: 5.

[0203] In some embodiments, a chimeric PT includes the motif [EV][LMW][RS]P[SAP]F[ST]F[IL][IL]AF (SEQ ID NO: 12) at or near a chimeric junction. In some embodiments, a chimeric PT includes the motif MTVMGMT (SEQ ID NO: 11) at residues corresponding to residues 195-206 of SEQ ID NO: 5.

[0204] In some embodiments, a chimeric PT includes the motif QFFEFIW (SEQ ID NO: 13) at or near a chimeric junction. In some embodiments, a chimeric PT includes the motif QFFEFIW (SEQ ID NO: 13) at residues corresponding to residues 304-310 of SEQ ID NO: 5.

[0205] In some embodiments, a chimeric PT includes the motif HNTNL (SEQ ID NO: 14) at residues corresponding to residues 57-61 of SEQ ID NO: 5.

[0206] In some embodiments, a chimeric PT includes the motif TCWKL (SEQ ID NO: 15) at residues corresponding to residues 30-34 of SEQ ID NO: 5.

[0207] In some embodiments, a chimeric PT includes the motif M[IL]LSHAILAFC (SEQ ID NO: 16) at or near a chimeric junction. In some embodiments, a chimeric PT includes the motif M[IL]LSHAILAFC (SEQ ID NO: 16) at residues corresponding to residues 274-284 of SEQ ID NO: 5.

[0208] In some embodiments, a chimeric PT includes the motif HVG[LV][AN]FT[SCF]Y[YS]A[ST][RT][AS]A[LF] (SEQ ID NO: 17) at or near a chimeric junction. In some embodiments, a chimeric PT includes the motif HVG[LV][AN]FT[SCF]Y[YS]A[ST][RT][AS]A[LF] (SEQ ID NO: 17) at residues corresponding to residues 175-190 of SEQ ID NO: 5.

[0209] In some embodiments, a chimeric PT includes the motif GLIVT (SEQ ID NO: 18) at or near a chimeric junction. In some embodiments, a chimeric PT includes the motif GLIVT (SEQ ID NO: 18) at residues corresponding to residues 126-130 of SEQ ID NO: 5.

[0210] In some embodiments, a chimeric PT includes the motif L[YH]YAEY[LF]V (SEQ ID NO: 19) at or near a chimeric junction. In some embodiments, a chimeric PT includes the motif L[YH]YAEY[LF]V (SEQ ID NO: 19) at residues corresponding to residues 312-319 of SEQ ID NO: 5.

[0211] In some embodiments, a chimeric PT includes the motif KAFFAL (SEQ ID NO: 20) at or near a chimeric junction. In some embodiments, a chimeric PT includes the motif KAFFAL (SEQ ID NO: 20 at residues corresponding to residues 69-74 of SEQ ID NO: 5.

[0212] In some embodiments, a chimeric PT includes the motif KLGARNMT (SEQ ID NO: 21) at residues corresponding to residues 237-244 of SEQ ID NO: 5.

[0213] In some embodiments, a chimeric PT includes the motif QAF[NK]SN (SEQ ID NO: 22) at or near a chimeric junction. In some embodiments, a chimeric PT includes the motif QAF[NK]SN (SEQ ID NO: 22) at residues corresponding to residues 267-272 of SEQ ID NO: 5.

[0214] In some embodiments, a chimeric PT includes the motif LIFQT (SEQ ID NO: 23) at or near a chimeric junction. In some embodiments, a chimeric PT includes the motif LIFQT (SEQ ID NO: 23) at residues corresponding to residues 285-289 of SEQ ID NO: 5.

[0215] In some embodiments, a chimeric PT includes the motif SIIVALT (SEQ ID NO: 24) at or near a chimeric junction. In some embodiments, a chimeric PT includes the motif SIIVALT (SEQ ID NO: 24) at residues corresponding to residues 119-125 of SEQ ID NO: 5.

[0216] In some embodiments, a chimeric PT includes the motif MSIETAW (SEQ ID NO: 25) at or near a chimeric junction. In some embodiments, a chimeric PT includes the motif MSIETAW (SEQ ID NO: 25) at residues corresponding to residues 110-116 of SEQ ID NO: 5.

[0217] In some embodiments, a chimeric PT includes the motif VVSGV (SEQ ID NO: 26) at or near a chimeric junction. In some embodiments, a chimeric PT includes the motif VVSGV (SEQ ID NO: 26) at residues corresponding to residues 246-250 of SEQ ID NO: 5.

[0218] In some embodiments, a chimeric PT includes the motif RPYVV (SEQ ID NO: 27) at or near a chimeric junction. In some embodiments, a chimeric PT includes the motif RPYVV (SEQ ID NO: 27) at residues corresponding to residues 36-40 of SEQ ID NO: 5.

[0219] In some embodiments, a chimeric PT includes the motif KPDLP (SEQ ID NO: 28) at residues corresponding to residues 100-104 of SEQ ID NO: 5.

[0220] In some embodiments, a chimeric PT includes the motif RWKQY (SEQ ID NO: 29) at residues corresponding to residues 100-104 of SEQ ID NO: 5.

[0221] In some embodiments, a chimeric PT includes the motif FLITI (SEQ ID NO: 30) at or near a chimeric junction. In some embodiments, a chimeric PT includes the motif FLITI (SEQ ID NO: 30) at residues corresponding to residues 168-172 of SEQ ID NO: 5.

[0222] In some embodiments, a chimeric PT includes the motif DIEGD (SEQ ID NO: 31) at residues corresponding to residues 222-226 of SEQ ID NO: 5.

[0223] In some embodiments, a chimeric PT includes the motif KYGVST (SEQ ID NO: 32) at residues corresponding to residues 228-233 of SEQ ID NO: 5.

[0224] The sequence of a chimeric PT associated with the disclosure can comprise the structure: X1-X2-X3-X4-X5-X6-X7-X8-X9-X10. In some embodiments, any one of X1, X2, X3, X4, X5, X6, X7, X8, X9, and X10 can comprise portions of CsPT1, CsPT2, CsPT3, CsPT4, CsPT5, CsPT6 or CsPT7. In some embodiments, X1, X2, X3, X4, X5, X6, X7, X8, X9 and/or X10 comprise portions of CsPT1. In some embodiments, X1, X2, X3, X4, X5, X6, X7, X8, X9 and/or X10 comprise portions of CsPT4. In some embodiments, X1, X2, X3, X4, X5, X6, X7, X8, X9 and/or X10 comprise portions of CsPT6. In some embodiments, X1, X2, X3, X4, X5, X6, X7, X8, X9 and/or X10 comprise portions of CsPT7. In some embodiments, X1, X3, X5, X7, and X9 comprise portions of CsPT4. In some embodiments, X2, X4, X6, X8, and X10 comprise portions of CsPT1, CsPT6 or CsPT7. In some embodiments, one or more of X1, X2, X3, X4, X5, X6, X7, X8, X9 and X10 includes a portion of a transmembrane helix. In some embodiments, each of X1, X2, X3, X4, X5, X6, X7, X8, X9 and X10 includes a portion of a transmembrane helix.

[0225] In some embodiments, the sequence of X1 comprises any of SEQ ID NOs: 33-39 or a sequence that comprises no more than 2 amino acid substitutions, insertions, additions or deletions relative to any one of SEQ ID NOs: 33-39. In some embodiments, the sequence of X2 comprises any of SEQ ID NOs: 40-46 or a sequence that comprises no more than 2 amino acid substitutions, insertions, additions or deletions relative to any one of SEQ ID NOs: 40-46. In some embodiments, the sequence of X3 comprises any of SEQ ID NOs: 47-53 or a sequence that comprises no more than 2 amino acid substitutions, insertions, additions or deletions relative to any one of SEQ ID NOs: 47-53. In some embodiments, the sequence of X4 comprises any of SEQ ID NOs: 54-60 or a sequence that comprises no more than 2 amino acid substitutions, insertions, additions or deletions relative to any one of SEQ ID NOs: 54-60. In some embodiments, the sequence of X5 comprises any of SEQ ID NOs: 61-67 or a sequence that comprises no more than 2 amino acid substitutions, insertions, additions or deletions relative to any one of SEQ ID NOs: 61-67. In some embodiments, the sequence of X6 comprises any of SEQ ID NOs: 68-74 or a sequence that comprises no more than 2 amino acid substitutions, insertions, additions or deletions relative to any one of SEQ ID NOs: 68-74. In some embodiments, the sequence of X7 comprises any of SEQ ID NOs: 75-81 or a sequence that comprises no more than 2 amino acid substitutions, insertions, additions or deletions relative to any one of SEQ ID NOs: 75-81. In some embodiments, the sequence of X8 comprises any of SEQ ID NOs: 82-88 or a sequence that comprises no more than 2 amino acid substitutions, insertions, additions or deletions relative to any one of SEQ ID NOs: 82-88. In some embodiments, the sequence of X9 comprises any of SEQ ID NOs: 89-95 or a sequence that comprises no more than 2 amino acid substitutions, insertions, additions or deletions relative to any one of SEQ ID NOs: 89-95. In some embodiments, the sequence of X10 comprises any of SEQ ID NOs: 96-102 or a sequence that comprises no more than 2 amino acid substitutions, insertions, additions or deletions relative to any one of SEQ ID NOs: 96-102.

[0226] In some embodiments, a chimeric PT comprises a sequence that is at least 5%, at least 10%, at least 15%, at least 20%, at least 25%, at least 30%, at least 35%, at least 40%, at least 45%, at least 50%, at least 55%, at least 60%, at least 65%, at least 70%, at least 71%, at least 72%, at least 73%, at least 74%, at least 75%, at least 76%, at least 77%, at least 78%, at least 79%, at least 80%, at least 81%, at least 82%, at least 83%, at least 84%, at least 85%, at least 86%, at least 87%, at least 88%, at least 89%, at least 90%, at least 91%, at least 92%, at least 93%, at least 94%, at least 95%, at least 96%, at least 97%, at least 98%, at least 99%, or is 100% identical, including all values in between, to any one of SEQ ID NOs: 110-121, 133-144, 757-868, 869-980, 982-1081 or 1083-1182, to any chimeric PT disclosed in Tables 13-16 and 19-20, or to any chimeric PT disclosed in this application.

b. Prenyltransferase Fusions

[0227] Further aspects of the disclosure relate to fusion proteins comprising PTs associated with the disclosure, including chimeric PTs. Chimeric PTs that are components of fusion proteins may in some instances be referred to within this disclosure as “chimeric fusions.”

[0228] For example, a PT may be linked to one or more genes in the cannabinoid biosynthesis pathway or a metabolic pathway of a host cell. In some embodiments, the one or more genes linked to the PT includes a gene that encodes a polypeptide having enzymatic activity such that its product is a substrate for the PT. In some embodiments, the one or more genes linked to the PT includes a gene that encodes a polypeptide having enzymatic activity such that the product of the PT is a substrate for the downstream polypeptide. In certain embodiments, a PT may be linked to a mutant form of one or more genes in the metabolic pathway of a host cell. In certain embodiments, a PT may be linked to a farnesyl pyrophosphate synthase. The farnesyl pyrophosphate synthase can be linked to the amino terminus or the carboxy terminus of a PT. In some embodiments, the farnesyl pyrophosphate synthase is linked to the amino terminus of the PT, with or without a linker sequence separating the farnesyl pyrophosphate synthase and the PT sequence.

[0229] Farnesyl pyrophosphate synthase enzymes convert isopentenyl diphosphate (IPP) and dimethylallyl diphosphate (DMAP) to geranyl pyrophosphate (GPP) and farnesyl pyrophosphate (FPP) in yeast cells. In some embodiments, a farnesyl pyrophosphate synthase enzyme may produce neryl pyrophosphate (NPP). In some embodiments, the farnesyl pyrophosphate synthase component of a PT fusion protein is the S. cerevisiae ERG20 protein. In some embodiments, the farnesyl pyrophosphate synthase comprises one or more mutations relative to a wild-type farnesyl pyrophosphate synthase. Mutations in a farnesyl pyrophosphate synthase may modulate the ratio of GPP and FPP produced by the enzyme. In some embodiments, the farnesyl pyrophosphate synthase comprises a mutation that increases the production of GPP relative to FPP. In some embodiments, the farnesyl pyrophosphate synthase comprises one or more mutations that reduce the levels of production of FPP and/or increase production of GPP. See, Ignea et al. ACS Synth. Biol. (2014) 3: 298-306.

[0230] In some embodiments, the farnesyl pyrophosphate synthase is ERG20, corresponding to UniProt Accession No. P08524, provided by SEQ ID NO: 424:

(SEQ ID NO: 424)
MASEKEIRRERFLNVFPKLVEELNASLLAYGMPKEACDWYAHSLNYNTP
GGKLNRGLSVVDTYAILSNKTVEQLGQEEYEKVAILGWCIELLQAYFLV
ADDMMDKSITRRGQPCWYKVPEVGEIAINDAFMLEAAIYKLLKSHFRNE
KYYIDITELFHEVTFQTELGQLMDLITAPEDKVDLSKFSLKKHSFIVTF
KTAYYSFYLPVALAMYVAGITDEKDLKQARDVLIPLGEYFQIQDDYLDC
FGTPEQIGKIGTDIQDNKCSWVINKALELASAEQRKTLDENYGKKDSVA
EAKCKKIFNDLKIEQLYHEYEESIAKDLKAKISQVDESRGFKADVLTAF
LNKVYKRSK.

[0231] In some embodiments, the farnesyl pyrophosphate synthase is ERG20 comprising F96W and/or N127W substitutions relative to the wildtype ERG20 sequence. The sequence of ERG20 F96W N127W is provided by SEQ ID NO: 103.

(SEQ ID NO: 103)
MASEKEIRRERFLNVFPKLVEELNASLLAYGMPKEACDWYAHSLNYNTP
GGKLNRGLSVVDTYAILSNKTVEQLGQEEYEKVAILGWCIELLQAYWLV
ADDMMDKSITRRGQPCWYKVPEVGEIAIWDAFMLEAAIYKLLKSHFRNE
KYYIDITELFHEVTFQTELGQLMDLITAPEDKVDLSKFSLKKHSFIVTF
KTAYYSFYLPVALAMYVAGITDEKDLKQARDVLIPLGEYFQIQDDYLDC
FGTPEQIGKIGTDIQDNKCSWVINKALELASAEQRKTLDENYGKKDSVA
EAKCKKIFNDLKIEQLYHEYEESIAKDLKAKISQVDESRGFKADVLTAF
LNKVYKRSK.

[0232] In some embodiments, the farnesyl pyrophosphate synthase comprises a mutation at position K197 of ERG20.

[0233] In some embodiments, the farnesyl pyrophosphate synthase comprises a protein sequence that is at least 40%, at least 45%, at least 50%, at least 55%, at least 60%, at least 65%, at least 70%, at least 71%, at least 72%, at least 73%, at least 74%, at least 75%, at least 76%, at least 77%, at least 78%, at least 79%, at least 80%, at least 81%, at least 82%, at least 83%, at least 84%, at least 85%, at least 86%, at least 87%, at least 88%, at least 89%, at least 90%, at least 91%, at least 92%, at least 93%, at least 94%, at least 95%, at least 96%, at least 97%, at least 98%, at least 99% identical, or is 100% identical, to SEQ ID NO: 424 or 103. In some embodiments, a farnesyl pyrophosphate synthase does not comprise SEQ ID NO: 103 or SEQ ID NO: 424.

[0234] Example 6 describes the identification of ERG20 homologs. In some embodiments, the farnesyl pyrophosphate synthase component of a fusion protein is an ERG20 homolog identified in Example 6, the sequences of which are provided in Table 17. In some embodiments, an ERG20 homolog comprises a tryptophan residue at a residue corresponding to amino acid positions F96 and/or N127 in S. cerevisiae ERG20. In some embodiments, an ERG20 homolog comprises a substitution at a residue corresponding to amino acid position K197 in S. cerevisiae ERG20.

[0235] In some embodiments, the farnesyl pyrophosphate synthase comprises a protein or nucleic acid sequence that is at least 40%, at least 45%, at least 50%, at least 55%, at least 60%, at least 65%, at least 70%, at least 71%, at least 72%, at least 73%, at least 74%, at least 75%, at least 76%, at least 77%, at least 78%, at least 79%, at least 80%, at least 81%, at least 82%, at least 83%, at least 84%, at least 85%, at least 86%, at least 87%, at least 88%, at least 89%, at least 90%, at least 91%, at least 92%, at least 93%, at least 94%, at least 95%, at least 96%, at least 97%, at least 98%, at least 99% identical, or is 100% identical, to any one of SEQ ID NOs: 426-476, 479-529, 753 or 754, to any sequence provided in Table 17, or to any other ERG20 homolog sequence provided in this disclosure.

[0236] Example 6 describes the identification of putative farnesyl pyrophosphate synthases that were effective in producing CBGA when fused with a prenyltransferase. Table 10 provides non-limiting examples of motifs that were identified in the sequences of the putative farnesyl pyrophosphate synthases that were effective in producing CBGA. In some embodiments, a farnesyl pyrophosphate synthase includes one or more of the following motifs, provided in Table 10: NVPGGKLNR (SEQ ID NO: 647), FYLPVALA[LM]H (SEQ ID NO: 648), A[EH]D[IV]LIPLG (SEQ ID NO: 651), LGW[CL][ITV]ELLQA[FY]FL (SEQ ID NO: 655), KKEV[FL][ET][SA]FL[AGN]KIYK (SEQ ID NO: 663), QRK[VI]L[DE]ENYG (SEQ ID NO: 667), VGMIAIWD (SEQ ID NO: 672), TDI[QK]DNKCSW (SEQ ID NO; 673), TAYYSFYLP (SEQ ID NO; 676), GKIGTDI[QK]DNKCSW (SEQ ID NO: 677), ILIP[LM]GEYFQ (SEQ ID NO: 680), IL[VM][EP][ML]G[ET][YF]FQ (SEQ ID NO: 683), AKIYKRSK (SEQ ID NO: 685), DPEVIGKI (SEQ ID NO: 686), RGQPCW[YF]RVP[EQ] (SEQ ID NO: 687), IVKYKTA[YF]Y[ST]FYLP (SEQ ID NO: 689), WC[IV]E[LW]LQA[YF][WF]LV[ALW]D (SEQ ID NO: 692), CSWLV[VN]Q[AC]L[AQ][RI][AC][ST]P[ED]Q (SEQ ID NO: 699).

[0237] In some embodiments, a farnesyl pyrophosphate synthase includes the motif NVPGGKLNR (SEQ ID NO. 647) at residues corresponding to residues 47-55 in SEQ ID NO: 424.

[0238] In some embodiments, a farnesyl pyrophosphate synthase includes the motif FYLPVALA[LM]H (SEQ ID NO: 648) at residues corresponding to residues 203-212 in SEQ ID NO: 424. In some embodiments, the motif FYLPVALA[LM]H is FYLPVALALH (SEQ ID NO: 649) or FYLPVALAMH (SEQ ID NO: 650).

[0239] In some embodiments, a farnesyl pyrophosphate synthase includes the motif A[EH]D[IV]LIPLG (SEQ ID NO: 651) at residues corresponding to residues 225-233 of SEQ ID NO: 424. In some embodiments, the motif A[EH]D[IV]LIPLG (SEQ ID NO: 651) is AEDILIPLG (SEQ ID NO: 652), AHDILIPLG (SEQ ID NO: 653), or AHDVLIPLG (SEQ ID NO: 654).

[0240] In some embodiments, a farnesyl pyrophosphate synthase includes the motif LGW[CL][ITV]ELLQA[FY]FL (SEQ ID NO: 655) at residues corresponding to residues 85-97 of SEQ ID NO: 424. In some embodiments, the motif LGW[CL][ITV]ELLQA[FY]FL (SEQ ID NO: 655) is LGWLTELLQAYFL (SEQ ID NO: 656), LGWLTELLQAFFL (SEQ ID NO: 657), LGWCIELLQAYFL (SEQ ID NO: 658), LGWCVELLQAYFL (SEQ ID NO: 659), LGWCVELLQAFFL (SEQ ID NO: 660), LGWCIELLQAFFL (SEQ ID NO: 661), or LGWCTELLQAFFL (SEQ ID NO: 662).

[0241] In some embodiments, a farnesyl pyrophosphate synthase includes the motif KKEV[FL][ET][SA]FL[AGN]KIYK (SEQ ID NO: 663) at residues corresponding to residues 336-349 of SEQ ID NO: 424. In some embodiments, the motif KKEV[FL][ET][SA]FL[AGN]KIYK (SEQ ID NO: 663) is KKEVFESFLAKIYK (SEQ ID NO: 664), KKEVFEAFLGKIYK (SEQ ID NO: 665), or KKEVLTSFLNKIYK (SEQ ID NO: 666).

[0242] In some embodiments, a farnesyl pyrophosphate synthase includes the motif QRK[VI]L[DE]ENYG (SEQ ID NO: 667) at residues corresponding to residues 279-288 of SEQ ID NO: 424. In some embodiments, the motif QRK[VI]L[DE]ENYG (SEQ ID NO: 667) is QRKVLDENYG (SEQ ID NO: 668), QRKILDENYG (SEQ ID NO: 669), QRKILEENYG (SEQ ID NO: 670), or QRKVLEENYG (SEQ ID NO: 671).

[0243] In some embodiments, a farnesyl pyrophosphate synthase includes the motif VGMIAIWD at residues corresponding to residues 121-128 of SEQ ID NO: 424.

[0244] In some embodiments, a farnesyl pyrophosphate synthase includes the motif TDI[QK]DNKCSW (SEQ ID NO: 673) at residues corresponding to residues 217-226 of SEQ ID NO: 424. In some embodiments, the motif TDI[QK]DNKCSW (SEQ ID NO: 673) is TDIQDNKCSW (SEQ ID NO: 674) or TDIKDNKCSW (SEQ ID NO: 675).

[0245] In some embodiments, a farnesyl pyrophosphate synthase includes the motif TAYYSFYLP (SEQ ID NO: 676) at residues corresponding to residues 198-206 of SEQ ID NO: 424.

[0246] In some embodiments, a farnesyl pyrophosphate synthase includes the motif GKIGTDI[QK]DNKCSW (SEQ ID NO: 677) at residues corresponding to residues 253-266 of SEQ ID NO: 424. In some embodiments, the motif GKIGTDI[QK]DNKCSW (SEQ ID NO: 677) is GKIGTDIQDNKCSW (SEQ ID NO: 678) or GKIGTDIKDNKCSW (SEQ ID NO: 679).

[0247] In some embodiments, a farnesyl pyrophosphate synthase includes the motif ILIP[LM]GEYFQ (SEQ ID NO: 680) at residues corresponding to residues 228-237 of SEQ ID NO: 424. In some embodiments, the motif ILIP[LM]GEYFQ (SEQ ID NO: 680) is ILIPLGEYFQ (SEQ ID NO: 681) or ILIPMGEYFQ (SEQ ID NO: 682).

[0248] In some embodiments, a farnesyl pyrophosphate synthase includes the motif IL[VM][EP][ML]G[ET][YF]FQ (SEQ ID NO: 683) at residues corresponding to residues 228-237 of SEQ ID NO: 424. In some embodiments, the motif IL[VM][EP][ML]G[ET][YF]FQ (SEQ ID NO: 683) is ILVPMGEYFQ (SEQ ID NO: 684).

[0249] In some embodiments, a farnesyl pyrophosphate synthase includes the motif AKIYKRSK (SEQ ID NO: 685) at residues corresponding to residues 345-352 of SEQ ID NO: 424.

[0250] In some embodiments, a farnesyl pyrophosphate synthase includes the motif DPEVIGKI (SEQ ID NO: 248) at residues corresponding to residues 248-255 of SEQ ID NO: 424.

[0251] In some embodiments, a farnesyl pyrophosphate synthase includes the motif RGQPCW[YF]RVP[EQ] (SEQ ID NO: 687) at residues corresponding to residues 110-120 of SEQ ID NO: 424. In some embodiments, the motif RGQPCW[YF]RVP[EQ] (SEQ ID NO: 687) is RGQPCWYRVPE (SEQ ID NO: 688).

[0252] In some embodiments, a farnesyl pyrophosphate synthase includes the motif IVKYKTA[YF]Y[ST]FYLP (SEQ ID NO: 689) at residues corresponding to residues 193-206 of SEQ ID NO: 424. In some embodiments, the motif IVKYKTA[YF]Y[ST]FYLP (SEQ ID NO: 689) is IVKYKTAFYSFYLP (SEQ ID NO: 690) or IVKYKTAYYSFYLP (SEQ ID NO: 691).

[0253] In some embodiments, a farnesyl pyrophosphate synthase includes the motif WC[IV]E[LW]LQA[YF][WF]LV[ALW]D (SEQ ID NO: 692) at residues corresponding to residues 87-100 of SEQ ID NO: 424. In some embodiments, the motif WC[IV]E[LW]LQA[YF][WF]LV[ALW]D (SEQ ID NO: 692) is WCIELLQAFFLVAD (SEQ ID NO: 693), WCIELLQAFWLVAD (SEQ ID NO: 694), WCIELLQAYFLVAD (SEQ ID NO: 695), WCIELLQAYWLVAD (SEQ ID NO: 696), WCIEWLQAFFLVAD (SEQ ID NO: 697) or WCVELLQAYFLVAD (SEQ ID NO: 698).

[0254] In some embodiments, a farnesyl pyrophosphate synthase includes the motif CSWLV[VN]Q[AC]L[AQ][RI][AC][ST]P[ED]Q (SEQ ID NO: 699) at residues corresponding to residues 264-279 of SEQ ID NO: 424. In some embodiments, the motif CSWLV[VN]Q[AC]L[AQ][RI][AC][ST]P[ED]Q (SEQ ID NO: 699) is CSWLVVQALARATPEQ (SEQ ID NO: 700).

[0255] In some embodiments of fusion proteins associated with the disclosure, a farnesyl pyrophosphate synthase and a chimeric PT are separated by a linker sequence. In some embodiments, the linker joins a C-terminal residue of the farnesyl pyrophosphate synthase and an N-terminal residue of the PT enzyme. In some embodiments, the linker is a peptide linker. Examples of peptide linkers include, for example SG, GGGS (SEQ ID NO: 104), SGSGSGSGS (SEQ ID NO: 105), GGGSGGGGSGGGGS (SEQ ID NO: 106), GGGSGGGGSGGGGSGGGGSGGGGS (SEQ ID NO: 107), GGGSGGGGSGGGGSGGGGSGGGGSGGGGSGGGGS (SEQ ID NO: 108), and GGGSGGGGSGGGGSGGGGSGGGGSGGGGSGGGGSGGGGSGGGGS (SEQ ID NO: 109).

[0256] Any of the PTs provided in this disclosure, including truncated PTs and/or chimeric PTs can be expressed as fusion proteins with any farnesyl pyrophosphate synthase provided in this disclosure.

[0257] In some embodiments, fusion proteins associated with the disclosure comprise, from N-terminus to C-terminus, a farnesyl pyrophosphate synthase, a linker, and a chimeric PT enzyme, or truncation thereof. In some embodiments, a fusion protein comprises, from N-terminus to C-terminus, ERG20 F96W N127W provided by SEQ ID NO: 103, a linker, and any of the chimeric PTs described in this disclosure, including truncations thereof. In other embodiments, a fusion protein comprises, from N-terminus to C-terminus, an ERG20 homolog provided by any one of SEQ ID NOs: 426476, a linker, and any of the chimeric PTs described in this disclosure, including truncations thereof.

[0258] In some embodiments, a fusion protein that includes a farnesyl pyrophosphate synthase and a PT comprises a protein or nucleic acid sequence that is at least 5%, at least 10%, at least 15%, at least 20%, at least 25%, at least 30%, at least 35%, at least 40%, at least 45%, at least 50%, at least 55%, at least 60%, at least 65%, at least 70%, at least 71%, at least 72%, at least 73%, at least 74%, at least 75%, at least 76%, at least 77%, at least 78%, at least 79%, at least 80%, at least 81%, at least 82%, at least 83%, at least 84%, at least 85%, at least 86%, at least 87%, at least 88%, at least 89%, at least 90%, at least 91%, at least 92%, at least 93%, at least 94%, at least 95%, at least 96%, at least 97%, at least 98%, at least 99%, or is 100% identical, including all values in between, to any one of SEQ ID NOs: 122-132, 145-155, 156-225, 226-423, 532-582, 585-635, 704, 710, 724, 729, 735, 749, 755 or 756, or any fusion protein disclosed in Tables 13-14, 16 and 18, or any fusion protein disclosed in this application.

c. Prenyltransferase Mutations

[0259] PTs associated with the disclosure, including chimeric PTs and chimeric fusions, may include one or more amino acid substitutions, additions, deletions or insertions corresponding to a reference sequence. In some embodiments, a PT comprises 1, 2, 3, 4, 5, 6, 7, 8, 9, 10, 11, 12, 13, 14, 15, 16, 17, 18, 19, 20, 21, 22, 23, 24, 25, 26, 27, 28, 29, 30, 31, 32, 33, 34, 35, 36, 37, 38, 39, 40, 41, 42, 43, 44, 45, 46, 47, 48, 49, 50, 51, 52, 53, 54, 55, 56, 57, 58, 59, 60, 61, 62, 63, 64, 65, 66, 67, 68, 69, 70, 71, 72, 73, 74, 75, 76, 77, 78, 79, 80, 81, 82, 83, 84, 85, 86, 87, 88, 89, 90, 91, 92, 93, 94, 95, 96, 97, 98, 99, 100, 101, 102, 103, 104, 105, 106, 107, 108, 109, 110, 111, 112, 113, 114, 115, 116, 117, 118, 119, 120, 121, 122, 123, 124, 125, 126, 127, 128, 129, 130, 131, 132, 133, 134, 135, 136, 137, 138, 139, 140, 141, 142, 143, 144, 145, 146, 147, 148, 149, 150, 151, 152, 153, 154, 155, 156, 157, 158, 159, 160, 161, 162, 163, 164, 165, 166, 167, 168, 169, 170, 171, 172, 173, 174, 175, 176, 177, 178, 179, 180, 181, 182, 183, 184, 185, 186, 187, 188, 189, 190, 191, 192, 193, 194, 195, 196, 197, 198, 199, 200, 201, 202, 203, 204, 205, 206, 207, 208, 209, 210, 211, 212, 213, 214, 215, 216, 217, 218, 219, 220, 221, 222, 223, 224, 225, 226, 227, 228, 229, 230, 231, 232, 233, 234, 235, 236, 237, 238, 239, 240, 241, 242, 243, 244, 245, 246, 247, 248, 249, 250, 251, 252, 253, 254, 255, 256, 257, 258, 259, 260, 261, 262, 263, 264, 265, 266, 267, 268, 269, 270, 271, 272, 273, 274, 275, 276, 277, 278, 279, 280, 281, 282, 283, 284, 285, 286, 287, 288, 289, 290, 291, 292, 293, 294, 295, 296, 297, 298, 299, 300, 301, 302, 303, 304, 305, 306, 307, 308, 309, 310, 311, 312, 313, 314, 315, 316, 317, 318, 319, 320, 321, 322, or 323 amino acid substitutions, additions, deletions or insertions relative to a reference sequence. In some embodiments, the reference sequence is SEQ ID NO: 5.

[0260] In some embodiments, a PT comprises an amino acid substitution, addition, deletion or insertion at a residue corresponding to position 29, 31, 39, 41, 43, 46, 47, 48, 52, 56, 59, 60, 67, 68, 72, 80, 82, 83, 86, 87, 91, 94, 110, 113, 136, 140, 141, 142, 145, 147, 148, 149, 151, 162, 163, 167, 170, 173, 174, 182, 184, 187, 197, 199, 210, 215, 216, 223, 231, 232, 243, 244, 245, 258, 260, 261, 263, 267, 272, 273, 277, 284, 288, 289, 298, 301, 302, 311, and/or 318 in SEQ ID NO: 5.

[0261] In some embodiments, the PT comprises the amino acid D at a residue corresponding to position 29 in SEQ ID NO: 5; the amino acid A at a residue corresponding to position 30 in SEQ ID NO: 5; the amino acid F at a residue corresponding to position 31 in SEQ ID NO: 5; the amino acid F at a residue corresponding to position 34 in SEQ ID NO: 5: the amino acid T at a residue corresponding to position 35 in SEQ ID NO; 5; the amino acid M, T, or A at a residue corresponding to position 39 in SEQ ID NO: 5; the amino acid I at a residue corresponding to position 40 in SEQ ID NO: 5; the amino acid V or I at a residue corresponding to position 41 in SEQ ID NO: 5; the amino acid V, A, or L at a residue corresponding to position 43 in SEQ ID NO: 5; the amino acid L, F, or I at a residue corresponding to position 45 in SEQ ID NO: 5; the amino acid G, C, or A at a residue corresponding to position 46 in SEQ ID NO: 5; the amino acid V or S at a residue corresponding to position 47 in SEQ ID NO: 5; the amino acid T at a residue corresponding to position 48 in SEQ ID NO: 5, the amino acid S or A at a residue corresponding to position 49 in SEQ ID NO: 5; the amino acid L or A at a residue corresponding to position 52 in SEQ ID NO: 5; the amino acid L, T, I at a residue corresponding to position 56 in SEQ ID NO: 5; the amino acid P at a residue corresponding to position 59 in SEQ ID NO: 5; the amino acid E. D, or N at a residue corresponding to position 60 in SEQ ID NO: 5; the amino acid I or F at a residue corresponding to position 62 in SEQ ID NO: 5; the amino acid L or I at a residue corresponding to position 67 in SEQ ID NO: 5; the amino acid G or F at a residue corresponding to position 68 in SEQ ID NO: 5; the amino acid E at a residue corresponding to position 72 in SEQ ID NO: 5; the amino acid G at a residue corresponding to position 73 in SEQ ID NO: 5; the amino acid V, L, F, or I at a residue corresponding to position 75 in SEQ ID NO: 5; the amino acid L or C at a residue corresponding to position 79 in SEQ ID NO: 5; the amino acid W at a residue corresponding to position 80 in SEQ ID NO: 5; the amino acid G at a residue corresponding to position 82 in SEQ ID NO: 5; the amino acid Y at a residue corresponding to position 83 in SEQ ID NO: 5; the amino acid N at a residue corresponding to position 85 in SEQ ID NO: 5; the amino acid S, T, A, G, F, V, or C at a residue corresponding to position 86 in SEQ ID NO: 5; the amino acid T, I, C, Q, V, or L at a residue corresponding to position 87 in SEQ ID NO: 5; the amino acid L or F at a residue corresponding to position 91 in SEQ ID NO: 5; the amino acid E at a residue corresponding to position 94 in SEQ ID NO: 5; the amino acid Y at a residue corresponding to position 102 in SEQ ID NO: 5; the amino acid I at a residue corresponding to position 105 in SEQ ID NO: 5; the amino acid A at a residue corresponding to position 106 in SEQ ID NO: 5; the amino acid I or L at a residue corresponding to position 110 in SEQ ID NO: 5; the amino acid R at a residue corresponding to position 113 in SEQ ID NO: 5; the amino acid L at a residue corresponding to position 117 in SEQ ID NO: 5; the amino acid I at a residue corresponding to position 118 in SEQ ID NO: 5; the amino acid A at a residue corresponding to position 119 in SEQ ID NO: 5; the amino acid S at a residue corresponding to position 121 in SEQ ID NO: 5; the amino acid S or F at a residue corresponding to position 122 in SEQ ID NO: 5; the amino acid I or L at a residue corresponding to position 129 in SEQ ID NO: 5; the amino acid G at a residue corresponding to position 134 in SEQ ID NO: 5; the amino acid P or S at a residue corresponding to position 136 in SEQ ID NO: 5; the amino acid L or I at a residue corresponding to position 139 in SEQ ID NO: 5; the amino acid L, I, T, or F at a residue corresponding to position 140 in SEQ ID NO: 5; the amino acid L, S, V, A, C, or I at a residue corresponding to position 141 in SEQ ID NO: 5; the amino acid A, L, M, or T at a residue corresponding to position 142 in SEQ ID NO: 5, the amino acid S, I, C, V, L, M, T, or F at a residue corresponding to position 145 in SEQ ID NO: 5; the amino acid L at a residue corresponding to position 147 in SEQ ID NO: 5; the amino acid S, A or L at a residue corresponding to position 148 in SEQ ID NO: 5; the amino acid E, W, C, I, Q, S, T or L at a residue corresponding to position 149 in SEQ ID NO: 5; the amino acid M, G, H, T, I, A, or C at a residue corresponding to position 151 in SEQ ID NO: 5; the amino acid I or L at a residue corresponding to position 152 in SEQ ID NO: 5; the amino acid R at a residue corresponding to position 162 in SEQ ID NO: 5; the amino acid F at a residue corresponding to position 163 in SEQ ID NO: 5; the amino acid A at a residue corresponding to position 167 in SEQ ID NO: 5; the amino acid A at a residue corresponding to position 169 in SEQ ID NO: 5; the amino acid T or C at a residue corresponding to position 170 in SEQ ID NO: 5; the amino acid I at a residue corresponding to position 171 in SEQ ID NO: 5; the amino acid F, L, or V at a residue corresponding to position 172 in SEQ ID NO: 5; the amino acid W, G, L, or T at a residue corresponding to position 173 in SEQ ID NO: 5; the amino acid T at a residue corresponding to position 174 in SEQ ID NO: 5; the amino acid F at a residue corresponding to position 176 in SEQ ID NO: 5; the amino acid T, L, A, I, or V at a residue corresponding to position 177 in SEQ ID NO: 5; the amino acid P or N at a residue corresponding to position 179 in SEQ ID NO: 5; the amino acid L, V, F, or S at a residue corresponding to position 182 in SEQ ID NO: 5; the amino acid Y or L at a residue corresponding to position 184 in SEQ ID NO: 5; the amino acid R at a residue corresponding to position 187 in SEQ ID NO: 5; the amino acid L or V at a residue corresponding to position 190 in SEQ ID NO: 5; the amino acid L, I, F, or W at a residue corresponding to position 196 in SEQ ID NO: 5; the amino acid I, A, V, or S at a residue corresponding to position 197 in SEQ ID NO: 5; the amino acid S or A at a residue corresponding to position 199 in SEQ ID NO: 5; the amino acid L at a residue corresponding to position 200 in SEQ ID NO: 5; the amino acid I or T at a residue corresponding to position 204 in SEQ ID NO: 5; the amino acid V at a residue corresponding to position 207 in SEQ ID NO: 5; the amino acid L at a residue corresponding to position 209 in SEQ ID NO: 5; the amino acid Y or F at a residue corresponding to position 210 in SEQ ID NO: 5; the amino acid S, T. or A at a residue corresponding to position 211 in SEQ ID NO: 5, the amino acid I or L at a residue corresponding to position 212 in SEQ ID NO: 5; the amino acid V, A, I, or G at a residue corresponding to position 213 in SEQ ID NO: 5; the amino acid Y at a residue corresponding to position 215 in SEQ ID NO: 5; the amino acid I at a residue corresponding to position 216 in SEQ ID NO: 5; the amino acid L at a residue corresponding to position 220 in SEQ ID NO: 5; the amino acid V at a residue corresponding to position 223 in SEQ ID NO: 5: the amino acid R or K at a residue corresponding to position 227 in SEQ ID NO: 5; the amino acid E or A at a residue corresponding to position 228 in SEQ ID NO: 5; the amino acid H or F at a residue corresponding to position 229 in SEQ ID NO: 5; the amino acid N at a residue corresponding to position 230 in SEQ ID NO: 5; the amino acid M, L, or I at a residue corresponding to position 231 in SEQ ID NO: 5; the amino acid R or K at a residue corresponding to position 232 in SEQ ID NO: 5, the amino acid L, F, or M at a residue corresponding to position 234 in SEQ ID NO: 5; the amino acid V at a residue corresponding to position 236 in SEQ ID NO: 5; the amino acid K at a residue corresponding to position 241 in SEQ ID NO: 5; the amino acid T at a residue corresponding to position 242 in SEQ ID NO: 5; the amino acid I, T, L, or A at a residue corresponding to position 243 in SEQ ID NO: 5; the amino acid A at a residue corresponding to position 244 in SEQ ID NO: 5; the amino acid W or R at a residue corresponding to position 245 in SEQ ID NO: 5; the amino acid L, I, M, or F at a residue corresponding to position 246 in SEQ ID NO: 5; the amino acid C, S. G, or A at a residue corresponding to position 247 in SEQ ID NO: 5; the amino acid L, T, I, A, or F at a residue corresponding to position 250 in SEQ ID NO: 5; the amino acid N, L, A, or C at a residue corresponding to position 254 in SEQ ID NO: 5, the amino acid V at a residue corresponding to position 256 in SEQ ID NO: 5; the amino acid G or L at a residue corresponding to position 257 in SEQ ID NO: 5; the amino acid A at a residue corresponding to position 258 in SEQ ID NO: 5; the amino acid L, V, A, 1, or F at a residue corresponding to position 260 in SEQ ID NO: 5; the amino acid G at a residue corresponding to position 262 in SEQ ID NO: 5; the amino acid A at a residue corresponding to position 261 in SEQ ID NO: 5: the amino acid A at a residue corresponding to position 263 in SEQ ID NO: 5; the amino acid G at a residue corresponding to position 262 in SEQ ID NO: 5; the amino acid N or F at a residue corresponding to position 264 in SEQ ID NO: 5; the amino acid F at a residue corresponding to position 267 in SEQ ID NO: 5; the amino acid K or L at a residue corresponding to position 271 in SEQ ID NO: 5; the amino acid S at a residue corresponding to position 272 in SEQ ID NO: 5; the amino acid F at a residue corresponding to position 273 in SEQ ID NO: 5; the amino acid I at a residue corresponding to position 275 in SEQ ID NO: 5; the amino acid F at a residue corresponding to position 276 in SEQ ID NO: 5; the amino acid S at a residue corresponding to position 277 in SEQ ID NO: 5; the amino acid L, W, or 1 at a residue corresponding to position 284 in SEQ ID NO: 5; the amino acid S at a residue corresponding to position 283 in SEQ ID NO: 5; the amino acid I or W at a residue corresponding to position 284 in SEQ ID NO: 5; the amino acid F at a residue corresponding to position 286 in SEQ ID NO: 5; the amino acid R at a residue corresponding to position 288 in SEQ ID NO: 5; the amino acid A at a residue corresponding to position 289 in SEQ ID NO: 5; the amino acid D at a residue corresponding to position 298 in SEQ ID NO: 5; the amino acid D, G, or T at a residue corresponding to position 301 in SEQ ID NO: 5; the amino acid T at a residue corresponding to position 302 in SEQ ID NO: 5 the amino acid R, N, or K at a residue corresponding to position 311 in SEQ ID NO: 5; and/or the amino acid L at a residue corresponding to position 318 in SEQ ID NO: 5.

[0262] In some embodiments, one or more substitution mutations are located at residues at or near the active site of a PT protein. The active site of a PT may be defined by generating the three-dimensional structure of the PT and identifying the residues within a particular distance of the GPP substrate binding site and/or the Mg binding site. As a non-limiting example, the structure of a PT may be generated using ROSETTA software. See, e.g., Kaufmann et al., Biochemistry 2010, 49, 2987-2998. As used in this disclosure, a residue is within the active site of a PT enzyme if it is within about 8 angstroms from the GPP substrate binding site and/or the Mg binding site. As used in this disclosure, a residue is near the active site of a PT enzyme if it is within about 8-12 angstroms from the GPP substrate binding site and/or the Mg binding site. In some embodiments, a substitution mutation is present in a residue corresponding to residue M43, F82, F83, I86, M87, S119, V122, F145, I147, or F151 in SEQ ID NO: 5.

[0263] In some embodiments, one or more substitution mutations are located in an apposing face of a helix that forms part of the active site of a CsPT. For example, in some embodiments, a substitution mutation is present in a residue corresponding to residue 186. F83, or M87 of SEQ ID NO: 5. In some embodiments, one or more substitution mutations are located in residues that are predicted to interact with a residue corresponding to residue 186 of SEQ ID NO: 5. For example, in some embodiments, a substitution mutation is present in a residue corresponding to residue F82, F83, M87, S119, or V122.

[0264] Without wishing to be bound by any theory, substitution mutations at a residue corresponding to position 86 in SEQ ID NO: 5 (e.g., I86S, I86G, I86A) may increase activity of the PT enzyme due to the decreased residue size relative to the corresponding residue in the wildtype protein. Reduction in side-chain volume at this position may lead to a slight shift in the helix, which could increase the volume of the olivetolic/divarinic acid binding pocket. Without wishing to be bound by any theory, substitution mutations at a residue corresponding to position 82 (e.g., F82G), 83 (e.g., F83Y), 87 (e.g., M87T, M87I, M87C, M87Q or M87V), 119 (e.g., S119A) and/or 122 (e.g., V122F or V122S) of SEQ ID NO: 5, may impact the olivetolic/divarinic acid binding pocket in a similar manner to that discussed above for position 86 in SEQ ID NO: 5. Without wishing to be bound by any theory, substitution mutations at a residue corresponding to position 82 (e.g., F82G), 94 (e.g., D94E), 147 (e.g., I147L), 227 (e.g., A227K), and/or 254 (e.g., T254N) of SEQ ID NO: 5, may increase CBGA production.

[0265] It should be appreciated that any of the PTs provided in this disclosure, including chimeric PTs and fusion proteins, can comprise any of the point mutations provided in this disclosure.

[0266] A PT described in this disclosure, including a chimeric PT and/or a chimeric fusion, may be capable of producing more CBGA and/or CBGVA relative to a control PT. In some embodiments, a control PT comprises any of SEQ ID NOs: 1-5.

[0267] In some embodiments, a PT described in this disclosure, including a chimeric PT and/or a chimeric fusion, that produces more CBGA and/or CBGVA relative to a control PT may be capable of producing at least 1% (e.g., at least 5%, at least 10%, at least 15%, at least 20%, at least 25%, at least 30%, at least 35%, at least 40%, at least 45%, at least 50%, at least 55%, at least 60%, at least 65%, at least 70%, at least 75%, at least 80%, at least 85%, at least 90%, at least 95%, at least 100%, at least 125%, at least 150%, at least 175%, at least 200%, at least 300%, at least 400%, at least 500%, at least 600%, at least 700%, at least 800%, at least 900%, or at least 1,000%) more CBGA and/or CBGVA than a control PT. In some embodiments, a control PT comprises any of SEQ ID NOs: 1-5.

[0268] In some embodiments, a PT described in this disclosure, including a chimeric PT and/or a fusion protein, that produces more CBGA and/or CBGVA relative to a control PT may be capable of producing at least 1% (e.g., at least 5%, at least 10%, at least 15%, at least 20%, at least 25%, at least 30%, at least 35%, at least 40%, at least 45%, at least 50%, at least 55%, at least 60%, at least 65%, at least 70%, at least 75%, at least 80%, at least 85%, at least 90%, at least 95%, at least 100%, at least 125%, at least 150%, at least 175%, at least 200%, at least 300%, at least 400%, at least 500%, at least 600%, at least 700%, at least 800%, at least 900%, or at least 1,000%) more CBGA and/or OGOA than a control PT. In some embodiments, a control PT comprises any of SEQ ID NOs: 1-5.

[0269] A recombinant host cell that expresses a heterologous gene encoding a PT described in this disclosure, including a chimeric PT and/or a chimeric fusion, may be capable of producing more CBGA and/or CBGVA relative to a host cell that expresses a control PT. In some embodiments, a control PT comprises any of SEQ ID NOs: 1-5.

[0270] In some embodiments, a recombinant host cell that expresses a heterologous gene encoding a PT described in this disclosure, including a chimeric PT and/or a chimeric fusion, that produces more CBGA and/or CBGVA relative to a control PT may be capable of producing at least 1% (e.g., at least 5%, at least 10%, at least 15%, at least 20%, at least 25%, at least 30%, at least 35%, at least 40%, at least 45%, at least 50%, at least 55%, at least 60%, at least 65%, at least 70%, at least 75%, at least 80%, at least 85%, at least 90%, at least 95%, at least 100%, at least 125%, at least 150%, at least 175%, at least 200%, at least 300%, at least 400%, at least 500%, at least 600%, at least 700%, at least 800%, at least 900%, or at least 1,000%) more CBGA and/or CBGVA relative to a host cell that expresses a control PT. In some embodiments, a control PT comprises any of SEQ ID NOs: 1-5.

[0271] In some embodiments, a recombinant host cell that expresses a heterologous gene encoding a PT described in this disclosure, including a chimeric PT and/or a fusion protein, that produces more CBGA and/or CBGVA relative to a control PT may be capable of producing at least 1% (e.g., at least 5%, at least 10%, at least 15%, at least 20%, at least 25%, at least 30%, at least 35%, at least 40%, at least 45%, at least 50%, at least 55%, at least 60%, at least 65%, at least 70%, at least 75%, at least 80%, at least 85%, at least 90%, at least 95%, at least 100%, at least 125%, at least 150%, at least 175%, at least 200%, at least 300%, at least 400%, at least 500%, at least 600%, at least 700%, at least 800%, at least 900%, or at least 1,000%) more CBGA and/or OGOA relative to a host cell that expresses a control PT. In some embodiments, a control PT comprises any of SEQ ID NOs: 1-5.

[0272] PTs for use in producing cannabinoids may be selected based on any one or more desired features, such as substrate selectivity, potential products formed, yield/titer of a product of interest, solubility, and/or localization (e.g. cytosolic localization, intramembrane localization) of the enzyme.

d. Substrate Selectivity

[0273] Many prenyltransferases are known to have promiscuity in regard to prenyl donors and acceptors, which may result in a broad spectrum of potential products formed using a particular enzyme (Chen et al. Nat. Chem. Biol. (2017): 13(2): 226-234). Without being bound by a particular theory, promiscuous enzymes may be useful in some embodiments because different products may be produced by the enzyme by varying the substrate. In some embodiments, a promiscuous enzyme may be useful in producing different products from a composition of heterogenous substrates.

[0274] As a non-limiting example, the PT from Streptomyces sp., NphB, has been previously shown to prenylate both olivetol and olivetolic acid (Kuzuyama et al. Nature, 2005). Wild-type NphB has also been reported to display a high degree of both substrate and product promiscuity. Similarly, C. sativa CsPT4 has been previously shown to prenylate both olivetol and olivetolic acid (Luo et al. Nature, 2019).

[0275] In some instances, it may be preferable for the prenyltransferase to have high specificity and not be promiscuous. For example, it may be preferable for the prenyltransferase to be specific for a particular substrate, so that the prenyltransferase produces a more homogenous product mix (i.e., greater product purity). Without being bound by a particular theory, an enzyme that has high specificity for a particular substrate may be useful because it may reduce possible by-products due to impurities in the substrate composition. For instance, when an enzyme is used with a host cell, the host cell may have intracellular mechanisms to convert a particular feed substrate into an undesirable substrate. In such instances, an enzyme that is highly specific for the non-converted substrate may be used to produce a product that has a higher purity of a compound of interest. In some instances, a highly specific enzyme may be useful for simplifying downstream processing, e.g., removing the need for further product purification.

[0276] In certain embodiments, prenyltransferases may use a resorcinol optionally substituted at the 5-position, a compound of Formula (5), a β-resorcylic acid optionally substituted at the 6-position, or a compound of Formula (6):

[chemical structure]

wherein R is hydrogen, optionally substituted acyl, optionally substituted alkyl, optionally substituted alkenyl, optionally substituted alkynyl, optionally substituted carbocyclyl, or optionally substituted aryl; and a compound comprising a prenyl group (e.g., geranyl diphosphate (GPP), isopentenyl diphosphate (IPP), neryl diphosphate (NPP), farnesyl diphosphate (FPP), and geranylgeranyl diphosphate (GGPP)) as substrates. R is as defined in this disclosure. In some embodiments, R is H, an optionally substituted C1-C11 alkyl, an optionally substituted C1-C11 alkenyl, an optionally substituted C1-C11 alkynyl, or an optionally substituted C1-C11 aralkyl.

[0277] In certain embodiments, prenyltransferases may use a compound of Formula (6):

[chemical structure]

wherein R is hydrogen, optionally substituted acyl, optionally substituted alkyl, optionally substituted alkenyl, optionally substituted alkynyl, optionally substituted carbocyclyl, or optionally substituted aryl; and a compound comprising a prenyl group (e.g., geranyl diphosphate (GPP), isopentenyl diphosphate (IPP), farnesyl diphosphate (FPP), and geranylgeranyl diphosphate (GGPP)) as substrates. R is as defined in this disclosure.

[0278] A prenyltransferase may have different affinities for a particular substrate based on the R group on the substrate (e.g., the R group on a compound of Formula (5) and/or the R group on a compound of Formula (6)) and/or based on the presence or absence of a carboxylic acid on the substrate. In some embodiments, a particular R group may confer particular physiological effects to a compound. In some embodiments, a prenyltransferase may be chosen based on the ability of the prenyltransferase to use a substrate with a particular R group to produce a cannabinoid or cannabinoid precursor with a particular physiological effect.

[0279] In certain embodiments, a compound of Formula (6) is olivetolic acid (OA) (compound 6a of formula:

[chemical structure]

divarinic acid, a 6-acyl-resorcinolic acid derivative, 6-alkyl-resorcinolic acid derivative, or a 2,4 dihydroxy-6-acylbenzoic acid. In certain embodiments, a compound of Formula (6) is olivetolic acid (OA). In certain embodiments, a compound of Formula (6) is of the formula:

[chemical structure]

wherein R is optionally substituted C₁₋₆ alkyl. In certain embodiments, a compound of Formula (6) is of the formula:

[chemical structure]

wherein R is unsubstituted C₁₋₆ alkyl. In certain embodiments, a compound of Formula (6) is divarinic acid. In certain embodiments, a compound of Formula (6) is a 6-acyl-resorcinolic acid derivative. In certain embodiments, a compound of Formula (6) is a 6-alkyl-resorcinolic acid derivative. In certain embodiments, a compound of Formula (6) is a 2,4 dihydroxy-6-acylbenzoic acid. In certain embodiments, in a compound of Formula (6). R is optionally substituted acyl. In some embodiments, orcinol, orsellinic acid, divarinol, divaric acid, olivetol, olivetolic acid, sphaerophorol, sphaeropholic acid, phlorisovalerophenone, naringenin, resveratrol, or a combination thereof are substrates.

[0280] In some embodiments, a substrate of the prenyltransferase is a compound of Formula (7′):

[chemical structure]

wherein a is 1, 2, 3, 4, 5, 6, 7, 8, 9, or 10, where examples include, but are not limited to, geranyl diphosphate or geranyl pyrophosphate (GPP), neryl pyrophosphate (NPP) or farnesyl pyrophosphate. In certain embodiments, a prenyltransferase substrate is a compound of Formula (7′):

[chemical structure]

wherein a is 1, 2, 3, 4, 5, 6, 7, 8, 9, or 10. In certain embodiments, a prenyltransferase substrate is a compound of Formula (7′):

[chemical structure]

wherein a is 1, 2, 3, 4, or 5. In certain embodiments, a prenyltransferase substrate is geranyl diphosphate or geranyl pyrophosphate (GPP).

[0281] In some embodiments, a is 1. In some embodiments, a is 2. In some embodiments, a is 3. In some embodiments, a is 4. In some embodiments, a is 5. In some embodiments, a is 6. In some embodiments, a is 7. In some embodiments, a is 8. In some embodiments, a is 9. In some embodiments, a is 10. In some embodiments, a is 1, 2, 3, 4, or 5. In some embodiments, a is 1, 2, 3, or 4. In some embodiments, a is 6, 7, 8, 9, or 10.

[0282] In some embodiments, a substrate of the prenyltransferase is a compound of Formula (7a):

[chemical structure]

In some embodiments, PT catalyzes the formation of a compound one or more of Formula (8a), Formula (8w), Formula (8x), Formula (8′), Formula (8y), and/or Formula (8z):

[chemical structure]

wherein a is 1, 2, 3, 4, 5, 6, 7, 8, 9, or 10.

[0283] In some embodiments, PT catalyzes the formation of a compound of Formula (8′);

[chemical structure]

wherein a is 1, 2, 3, 4, 5, 6, 7, 8, 9, or 10.

[0284] In some embodiments, a is 1. In some embodiments, a is 2. In some embodiments, a is 3. In some embodiments, a is 4. In some embodiments, a is 5. In some embodiments, a is 6. In some embodiments, a is 7. In some embodiments, a is 8. In some embodiments, a is 9. In some embodiments, a is 10. In some embodiments, a is 1, 2, 3, 4, or 5. In some embodiments, a is 1, 2, 3, or 4. In some embodiments, a is 6, 7, 8, 9, or 10.

[0285] In some embodiments, PT catalyzes the formation of a compound of Formula (8):

[chemical structure]

[0286] In some embodiments, a compound of Formula (8) is a compound of Formula (8a):

[chemical structure]

[0287] In some embodiments, PT catalyzes the formation of a compound of Formula (8x):

[chemical structure]

[0288] In some embodiments, a compound of Formula (8x) is of Formula (13):

[chemical structure]

[0289] In some embodiments, PT catalyzes the formation of a compound of Formula (13):

[chemical structure]

[0290] In some embodiments, a compound of Formula (13) is a compound of Formula (8b):

[chemical structure]

[0291] In some embodiments, the PT is a cannabigerolic acid synthase (CBGAS). CBGAS catalyzes the formation of CBGA from OA and GPP.

[0292] In some embodiments, a PT is a cannabigerovarinic acid synthase (CBGVAS). CBGVAS catalyze the formation of CBGVA from divarinic acid (DVA) and geranyl pyroshosphate (GPP).

[0293] In some embodiments, a PT may be capable of consuming a substrate of a compound of Formula 6 in FIG. 2 at a rate that is at least 1% (e.g., at least 5%, at least 10%, at least 15%, at least 20%, at least 25%, at least 30%, at least 35%, at least 40%, at least 45%, at least 50%, at least 55%, at least 60%, at least 65%, at least 70%, at least 75%, at least 80%, at least 85%, at least 90%, at least 95%, at least 100%, at least 125%, at least 150%, at least 175%, at least 200%, at least 300%, at least 400%, at least 500%, at least 600%, at least 700%, at least 800%, at least 900%, or at least 1,000%) faster or slower relative to a control.

[0294] In some embodiments, a control is a wild-type reference PT. A wild-type reference PT can be full-length or truncated. A wild-type reference PT can be part of a fusion protein. In some embodiments, a control is any one of SEQ ID NOs: 1-10. In some embodiments, a control is a fusion protein comprising any one of SEQ ID NOs: 1-10.

e. Prenylation

[0295] In addition to promiscuity in regard to potential substrates utilized, many prenyltransferases are known to also be promiscuous as to the products formed due to the ability to prenylate a prenyl acceptor at different sites, further resulting in a broad spectrum of potential products formed using a particular enzyme (Chen et al. Nat. Chem. Biol. (2017): 13(2): 226-234). When tested for activity using geranyl pyrophosphate (GPP) and olivetolic acid (OA) as substrates, NphB and CsPT4 produce multiple prenylation products (Kumano et al. Bioorganic Medicinal Chemistry, 2008; Luo et al. Nature, 2019). In particular, on OA at carbon positions labeled 3 and 5 and oxygen positions labeled 2 and 4 in Structure 6a (FIG. 4). Zirpel et al. reported the major prenylation product of wild-type NphB to be 2-O-Geranyl Olivetolic Acid (OGOA, Formula (8b) in FIG. 4)), with CBGA produced as the minor product (Formula (8a) in FIG. 1 and FIG. 4, Zirpel et al. Journal of Biotechnology, 2017). Functional expression of NphB and production of CBGA in S. cerevisiae was detected (Zirpel et al. Journal of Biotechnology, 2017).

[0296] In some instances, it may be preferable to prenylate at a particular position in Formula (6) or Formula (5). For example, it may be preferable to use a prenyltransferase (e.g., in combination with a terminal synthase) to produce phytocannabinoids, which are commonly prenylated at the C3 position of Formula (6).

[0297] In some instances, prenylation at a particular position in Formula (6) or Formula (5) may be used to alter the pharmacokinetic profile of cannabinoid products. For example, prenylation at a particular position in Formula (6) or Formula (5) may allow for the development of a cannabinoid product that crosses the blood brain barrier.

[0298] In some embodiments, a PT described in this disclosure transfers one or more prenyl groups to any of positions 2, 3, 4, or 5 in a compound of Formula (5), shown below:

[chemical structure]

[0299] In some embodiments, a PT described in this disclosure transfers one or more prenyl groups to position 3 in a compound of Formula (5), shown below:

[chemical structure]

[0300] In some embodiments, a PT described in this disclosure transfers one or more prenyl groups to any of positions 1, 2, 3, 4, or 5 in a compound of Formula (6), shown below:

[chemical structure]

[0301] In some embodiments, the PT transfers a prenyl group to any of positions 1, 2, 3, 4, or 5 in a compound of Formula (6), shown below:

[chemical structure]

to form a compound of one or more of Formula (8w), Formula (8x), Formula (8′), Formula (8y), Formula (8z):

[chemical structure]

or a pharmaceutically acceptable salt, solvate, hydrate, polymorph, co-crystal, tautomer, stereoisomer, isotopically labeled derivative, or prodrug thereof, wherein a is 1, 2, 3, 4, 5, 6, 7, 8, 9, or 10. In some embodiments, the PT transfers a prenyl group to any of positions 1, 2, 3, 4, or 5 in a compound of Formula (6), shown below:

[chemical structure]

to form a compound of one or more of Formula (8w), Formula (8x), Formula (8′), Formula (8y), Formula (8z), wherein a is 1, 2, 3, 4, or 5. In some embodiments, the PT transfers a prenyl group to any of positions 1, 2, 3, 4, or 5 in a compound of Formula (6), shown below:

[chemical structure]

to form a compound of one or more of Formula (8w), Formula (8x), Formula (8′), Formula (8y), Formula (8z), or a pharmaceutically acceptable salt thereof, wherein a is 1, 2, 3, 4, 5, 6, 7, 8, 9, or 10.

[0302] In some embodiments, provided is a host cell where the PT is capable of producing a compound using a substrate of Formula (6):

[chemical structure]

by transferring one or more prenyl groups to any of positions 1, 2, 3, 4, or 5 in the substrate of Formula (6).

[0303] In some embodiments, provided is a host cell where the PT is capable of producing a compound using a substrate of Formula (6):

[chemical structure]

by transferring a prenyl group to any of positions 1, 2, 3, 4, or 5 in the substrate of Formula (6),
to form a compound of one or more of Formula (8w), Formula (8x). Formula (8′), Formula (8y), and/or Formula (8z):

[chemical structure]

wherein a is 1, 2, 3, 4, 5, 6, 7, 8, 9, or 10.

[0304] In some embodiments, provided is a host cell where the PT is capable of producing a compound using a substrate of Formula (6):

[chemical structure]

by transferring aprenyl group to position 1 in the substrate of Formula (6), to form a compound of Formula (8w):

[chemical structure]

[0305] In some embodiments, provided is a host cell where the PT is capable of producing a compound using a substrate of Formula (6):

[chemical structure]

by transferring a prenyl group to position 2 in the substrate of Formula (6), to form a compound of Formula (8x):

[chemical structure]

[0306] In some embodiments, provided is a host cell where the PT is capable of producing a compound using a substrate of Formula (6):

[chemical structure]

by transferring a prenyl group to position 2 in the substrate of Formula (6), to form a compound of Formula (13):

[chemical structure]

[0307] In some embodiments, provided is a host cell where the PT is capable of producing a compound using a substrate of Formula (6):

[chemical structure]

by transferring a prenyl group to position 3 in the substrate of Formula (6), to form a compound of Formula (8′):

[chemical structure]

[0308] In some embodiments, provided is a host cell where the PT is capable of producing a compound using a substrate of Formula (6):

[chemical structure]

by transferring a prenyl group to position 3 in the substrate of Formula (6), to form a compound of Formula (8):

[chemical structure]

[0309] In some embodiments, provided is a host cell where the PT is capable of producing a compound using a substrate of Formula (6):

[chemical structure]

by transferring a prenyl group to position 4 in the substrate of Formula (6), to form a compound of Formula (8y):

[chemical structure]

[0310] In some embodiments, provided is a host cell where the PT is capable of producing a compound using a substrate of Formula (6):

[chemical structure]

by transferring a prenyl group to position 5 in the substrate of Formula (6), to form a compound of Formula (8z):

[chemical structure]

[0311] In some embodiments, provided is a method for producing a prenylated product of a compound of Formula (6);

[chemical structure]

comprising contacting:
[0312] (a) a compound of Formula (6):

[chemical structure]

and
   (b) a compound of Formula (7′):

[chemical structure]

wherein a is 1, 2, 3, 4, 5, 6, 7, 8, 9, or 10;
in the presence of (c) a PT comprising a sequence that is at least 90% identical to a PT sequence disclosed in this application, including chimeric PTs and fusions comprising chimeric PTs.

[0313] In some embodiments, provided is a method for producing a prenylated product of a compound of Formula (6):

[chemical structure]

comprising contacting:
[0314] (a) a compound of Formula (6): 198

[chemical structure]

and
[0315] (b) a compound of Formula (7a):

[chemical structure]

in the presence of (c) a PT comprising a sequence that is at least 90% identical to a PT sequence disclosed in this application, including chimeric PTs and fusions comprising chimeric PTs.

[0316] In some embodiments, the prenylated product of a compound of Formula (6) is a compound of Formula (8w), Formula (8x), Formula (8′), Formula (8y), or Formula (8z):

[chemical structure]

wherein a is 1, 2, 3, 4, 5, 6, 7, 8, 9, or 10. In some embodiments, the prenylated product of a compound of Formula (6) is a compound of Formula (8w), Formula (8x), Formula (8′), Formula (8y), or Formula (8z); wherein a is 1, 2, 3, 4, or 5. In some embodiments, the prenylated product of a compound of Formula (6) is a compound of Formula (8w), Formula (8x), Formula (8′), Formula (8y), or Formula (8z); wherein a is 6, 7, 8, 9, or 10.

[0317] In some embodiments, one or more mutations may be introduced into a prenyltransferase to change the enzyme's preferred prenylation site on a substrate. In some embodiments, the mutations are located at one or more residues corresponding to Y288, F213, Y288, G286, F213, Y288, and A232 in wild-type NphB. For example, in some embodiments, the mutations correspond to one or more of Y288A, F213H, Y288N, G286S, F213N, Y288V, and A232S in wild-type NphB. See, e.g., the NphB mutations disclosed in Valliere et al. Nat Commun. 2019 Feb. 4; 10(1):565, which is incorporated by reference in this disclosure in its entirety.

[0318] Any of the enzymes, host cells, and methods described in this application may be used for the production of cannabinoids and cannabinoid precursors, such as those provided in Table 1. In general, the term “production” is used to refer to the generation of one or more products (e.g., products of interest and/or by-products/off-products), for example, from a particular substrate or reactant. The amount of production may be evaluated at any one or more steps of a pathway, such as a final product or an intermediate product, using metrics familiar to one of ordinary skill in the art. For example, the amount of production may be assessed for a single enzymatic reaction (e.g., conversion of OA to CBGAS by a PT). Alternatively or in addition, the amount of production may be assessed for a series of enzymatic reactions (e.g., the biosynthetic pathway shown in FIG. 1 and/or FIG. 2). Production may be assessed by any metrics known in the art, for example, by assessing volumetric productivity, enzyme kinetics/reaction rate, specific productivity biomass-specific productivity, titer, yield, and total titer of one or more products (e.g. products of interest and/or by-products/off-products).

[0319] In some embodiments, the metric used to measure production may depend on whether a continuous process is being monitored (e.g., several cannabinoid biosynthesis steps are used in combination) or whether a particular end product is being measured. For example, in some embodiments, metrics used to monitor production by a continuous process may include volumetric productivity, enzyme kinetics and reaction rate. In some embodiments, metrics used to monitor production of a particular product may include specific productivity biomass-specific productivity, titer, yield, and total titer of one or more products (e.g., products of interest and/or by-products/off-products).

[0320] Production of one or more products (e.g., products of interest and/or by-products/off-products) may be assessed indirectly, for example by determining the amount of a substrate remaining following termination of the reaction/fermentation. For example, for a CBGAS that catalyzes the formation of products (e.g., CBGA and OGOA) from OA and GPP, production of the products may be assessed by quantifying the CBGA (or OGOA) directly or by quantifying the amount of substrate remaining following the reaction (e.g. amount of OA or GPP).

[0321] In instances in which prenylation at a particular position in a compound is desired, it may be preferable to monitor production of products directly. For example, if one or more mutations are introduced into a reference prenyltransferase to alter the preferred prenylation site on a substrate, the reference prenyltransferase and its mutated counterpart may consume the same amount of a particular substrate, but may produce a different ratio of products. In some embodiments, a PT that exhibits high production of by-products but low production of a desired product may still be used, for example if one or more mutations are introduced that shift production to a preferred product.

[0322] In some embodiments, the production of a product (e.g., products of interest and/or by-products/off-products) may be assessed as relative production, for example relative to a control. In some embodiments, the production of CBGA by a particular PT may be assessed relative to a control. The control PT may be, e.g., a wild-type enzyme, or an enzyme containing one or more mutations. In some embodiments, the production of CBGA by a particular PT in a host cell may be assessed relative to a PT in another host cell. In some embodiments, the production of CBGA from a particular substrate may be assessed relative to a control using a different substrate.

[0323] In some embodiments, a PT may be capable of producing at least 1% (e.g., at least 5%, at least 10%, at least 15%, at least 20%, at least 25%, at least 30%, at least 35%, at least 40%, at least 45%, at least 50%, at least 55%, at least 60%, at least 65%, at least 70%, at least 75%, at least 80%, at least 85%, at least 90%, at least 95%, at least 100%, at least 125%, at least 150%, at least 175%, at least 200%, at least 300%, at least 40%, at least 500%, at least 6000%, at least 700%, at least 800%, at least 900%, or at least 1,000%) the amount of one or more products relative to a control.

[0324] In some embodiments, a PT may be capable of producing a product at a higher titer or yield relative to a control. In some embodiments, a PT may be capable of producing a product at a faster rate (e.g., higher productivity) relative to a control. In some embodiments, a PT may have preferential binding and/or activity towards one substrate relative to another substrate. In some embodiments, a PT may preferentially produce one product relative to another product.

[0325] In some embodiments, a PT may produce at least 0.0001 μg/L, at least 0.001 μg/L, at least 0.01 μg/L, at least 0.02 μg/L, at least 0.03 μg/L, at least 0.04 μg/L, at least 0.05 μg/L, at least 0.06 μg/L, at least 0.07 μg/L, at least 0.08 μg/L, at least 0.09 μg/L, at least 0.1 μg/L, at least 0.11 μg/L, at least 0.12 μg/L, at least 0.13 μg/L, at least 0.14 μg/L, at least 0.15 μg/L, at least 0.16 μg/L, at least 0.17 μg/L, at least 0.18 μg/L, at least 0.19 μg/L, at least 0.2 μg/L, at least 0.21 μg/L, at least 0.22 μg/L, at least 0.23 μg/L, at least 0.24 μg/L, at least 0.25 μg/L, at least 0.26 μg/L, at least 0.27 μg/L, at least 0.28 μg/L, at least 0.29 μg/L, at least 0.3 μg/L, at least 0.31 μg/L, at least 0.32 μg/L, at least 0.33 μg/L, at least 0.34 μg/L, at least 0.35 μg/L, at least 0.36 μg/L, at least 0.37 μg/L, at least 0.38 μg/L, at least 0.39 μg/L, at least 0.4 μg/L, at least 0.41 μg/L, at least 0.42 μg/L, at least 0.43 μg/L, at least 0.44 μg/L, at least 0.45 μg/L, at least 0.46 μg/L, at least 0.47 μg/L, at least 0.48 μg/L, at least 0.49 μg/L, at least 0.5 μg/L, at least 0.51 μg/L, at least 0.52 μg/L, at least 0.53 μg/L, at least 0.54 μg/L, at least 0.55 μg/L, at least 0.56 μg/L, at least 0.57 μg/L, at least 0.58 μg/L, at least 0.59 μg/L, at least 0.6 μg/L, at least 0.61 μg/L, at least 0.62 μg/L, at least 0.63 μg/L, at least 0.64 μg/L, at least 0.65 μg/L, at least 0.66 μg/L, at least 0.67 μg/L, at least 0.68 μg/L, at least 0.69 μg/L, at least 0.7 μg/L, at least 0.71 μg/L, at least 0.72 μg/L, at least 0.73 μg/L, at least 0.74 μg/L, at least 0.75 μg/L, at least 0.76 μg/L, at least 0.77 μg/L, at least 0.78 μg/L, at least 0.79 μg/L, at least 0.8 μg/L, at least 0.81 μg/L, at least 0.82 μg/L, at least 0.83 μg/L, at least 0.84 μg/L, at least 0.85 μg/L, at least 0.86 μg/L, at least 0.87 μg/L, at least 0.88 μg/L, at least 0.89 μg/L, at least 0.9 μg/L, at least 0.91 μg/L, at least 0.92 μg/L, at least 0.93 μg/L, at least 0.94 μg/L, at least 0.95 μg/L, at least 0.96 μg/L, at least 0.97 μg/L, at least 0.98 μg/L, at least 0.99 μg/L, at least 1 μg/L, at least 1.1 μg/L, at least 1.2 μg/L, at least 1.3 μg/L, at least 1.4 μg/L, at least 1.5 μg/L, at least 1.6 μg/L, at least 1.7 μg/L, at least 1.8 μg/L, at least 1.9 μg/L, at least 2 μg/L, at least 2.1 μg/L, at least 2.2 μg/L, at least 2.3 μg/L, at least 2.4 μg/L, at least 2.5 μg/L, at least 2.6 μg/L, at least 2.7 μg/L, at least 2.8 μg/L, at least 2.9 μg/L, at least 3 μg/L, at least 3.1 μg/L, at least 3.2 μg/L, at least 3.3 μg/L, at least 3.4 μg/L, at least 3.5 μg/L, at least 3.6 μg/L, at least 3.7 μg/L, at least 3.8 μg/L, at least 3.9 μg/L, at least 4 μg/L, at least 4.1 μg/L, at least 4.2 μg/L, at least 4.3 μg/L, at least 4.4 μg/L, at least 4.5 μg/L, at least 4.6 μg/L, at least 4.7 μg/L, at least 4.8 μg/L, at least 4.9 μg/L, at least 5 μg/L, at least 5.1 μg/L, at least 5.2 μg/L, at least 5.3 μg/L, at least 5.4 μg/L, at least 5.5 μg/L, at least 5.6 μg/L, at least 5.7 μg/L, at least 5.8 μg/L, at least 5.9 μg/L, at least 6 μg/L, at least 6.1 μg/L, at least 6.2 μg/L, at least 6.3 μg/L, at least 6.4 μg/L, at least 6.5 μg/L, at least 6.6 μg/L, at least 6.7 μg/L, at least 6.8 μg/L, at least 6.9 μg/L, at least 7 μg/L, at least 7.1 μg/L, at least 7.2 μg/L, at least 7.3 μg/L, at least 7.4 μg/L, at least 7.5 μg/L, at least 7.6 μg/L, at least 7.7 μg/L, at least 7.8 μg/L, at least 7.9 μg/L, at least 8 μg/L, at least 8.1 μg/L, at least 8.2 μg/L, at least 8.3 μg/L, at least 8.4 μg/L, at least 8.5 μg/L, at least 8.6 μg/L, at least 8.7 μg/L, at least 8.8 μg/L, at least 8.9 μg/L, at least 9 μg/L, at least 9.1 μg/L, at least 9.2 μg/L, at least 9.3 μg/L, at least 9.4 μg/L, at least 9.5 μg/L, at least 9.6 μg/L, at least 9.7 μg/L, at least 9.8 μg/L, at least 9.9 μg/L, at least 10 μg/L, at least 10.1 μg/L, at least 10.2 μg/L, at least 10.3 μg/L, at least 10.4 μg/L, at least 10.5 μg/L, at least 10.6 μg/L, at least 10.7 μg/L, at least 10.8 μg/L, at least 10.9 μg/L, at least 11 μg/L, at least 11.1 μg/L, at least 11.2 μg/L, at least 11.3 μg/L, at least 11.4 μg/L, at least 11.5 μg/L, at least 11.6 μg/L, at least 11.7 μg/L, at least 11.8 μg/L, at least 11.9 μg/L, at least 12 μg/L, at least 12.1 μg/L, at least 12.2 μg/L, at least 12.3 μg/L, at least 12.4 μg/L, at least 12.5 μg/L, at least 12.6 μg/L, at least 12.7 μg/L, at least 12.8 μg/L, at least 12.9 μg/L, at least 13 μg/L, at least 13.1 μg/L, at least 13.2 μg/L, at least 13.3 μg/L, at least 13.4 μg/L, at least 13.5 μg/L, at least 13.6 μg/L, at least 13.7 μg/L, at least 13.8 μg/L, at least 13.9 μg/L, at least 14 μg/L, at least 14.1 μg/L, at least 14.2 μg/L, at least 14.3 μg/L, at least 14.4 μg/L, at least 14.5 μg/L, at least 14.6 μg/L, at least 14.7 μg/L, at least 14.8 μg/L, at least 14.9 μg/L, at least 15 μg/L, at least 15.1 μg/L, at least 15.2 μg/L, at least 15.3 μg/L, at least 15.4 μg/L, at least 15.5 μg/L, at least 15.6 μg/L, at least 15.7 μg/L, at least 15.8 μg/L, at least 15.9 μg/L, at least 16 μg/L, at least 16.1 μg/L, at least 16.2 μg/L, at least 16.3 μg/L, at least 16.4 μg/L, at least 16.5 μg/L, at least 16.6 μg/L, at least 16.7 μg/L, at least 16.8 μg/L, at least 16.9 μg/L, at least 17 μg/L, at least 17.1 μg/L, at least 17.2 μg/L, at least 17.3 μg/L, at least 17.4 μg/L, at least 17.5 μg/L, at least 17.6 μg/L, at least 17.7 μg/L, at least 17.8 μg/L, at least 17.9 μg/L, at least 18 μg/L, at least 18.1 μg/L, at least 18.2 μg/L, at least 18.3 μg/L, at least 18.4 μg/L, at least 18.5 μg/L, at least 18.6 μg/L, at least 18.7 μg/L, at least 18.8 μg/L, at least 18.9 μg/L, at least 19 μg/L, at least 19.1 μg/L, at least 19.2 μg/L, at least 19.3 μg/L, at least 19.4 μg/L, at least 19.5 μg/L, at least 19.6 μg/L, at least 19.7 μg/L, at least 19.8 μg/L, at least 19.9 μg/L, at least 20 μg/L, at least 25 μg/L, at least 30 μg/L, at least 35 μg/L, at least 40 μg/L, at least 45 μg/L, at least 50 μg/L, at least 55 μg/L, at least 60 μg/L, at least 65 μg/L, at least 70 μg/L, at least 75 μg/L, at least 80 μg/L, at least 85 μg/L, at least 90 μg/L, at least 95 μg/L, at least 100 μg/L, at least 105 μg/L, at least 110 μg/L, at least 115 μg/L, at least 120 μg/L, at least 125 μg/L, at least 130 μg/L, at least 135 μg/L, at least 140 μg/L, at least 145 μg/L, at least 150 μg/L, at least 155 μg/L, at least 160 μg/L, at least 165 μg/L, at least 170 μg/L, at least 175 μg/L, at least 180 μg/L, at least 185 μg/L, at least 190 μg/L, at least 195 μg/L, at least 200 μg/L, at least 205 μg/L, at least 210 μg/L, at least 215 μg/L, at least 220 μg/L, at least 225 μg/L, at least 230 μg/L, at least 235 μg/L, at least 240 μg/L, at least 245 μg/L, at least 250 μg/L, at least 255 μg/L, at least 260 μg/L, at least 265 μg/L, at least 270 μg/L, at least 275 μg/L, at least 280 μg/L, at least 285 μg/L, at least 290 μg/L, at least 295 μg/L, at least 300 μg/L, at least 305 μg/L, at least 310 μg/L, at least 315 μg/L, at least 320 μg/L, at least 325 μg/L, at least 330 μg/L, at least 335 μg/L, at least 340 μg/L, at least 345 μg/L, at least 350 μg/L, at least 355 μg/L, at least 360 μg/L, at least 365 μg/L, at least 370 μg/L, at least 375 μg/L, at least 380 μg/L, at least 385 μg/L, at least 390 μg/L, at least 395 μg/L, at least 400 μg/L, at least 405 μg/L, at least 410 μg/L, at least 415 μg/L, at least 420 μg/L, at least 425 μg/L, at least 430 μg/L, at least 435 μg/L, at least 440 μg/L, at least 445 μg/L, at least 450 μg/L, at least 455 μg/L, at least 460 μg/L, at least 465 μg/L, at least 470 μg/L, at least 475 μg/L, at least 480 μg/L, at least 485 μg/L, at least 490 μg/L, at least 495 μg/L, at least 500 μg/L, at least 600 μg/L, at least 700 μg/L, at least 800 μg/L, at least 900 μg/L, at least or 1000 μg/L of one or more compounds selected from those listed in Table 3. In Table 3, for each compound, a may independently be 1, 2, 3, 4, 5, 6, 7, 8, 9, or 10. In some embodiments, the compound is CBGA. In some embodiments, the compound is CBGVA. In some embodiments, the compound is OGOA.

[0326] In some embodiments, a PT may be capable of producing at least 1% (e.g., at least 5%, at least 10%, at least 15%, at least 20%, at least 25%, at least 30%, at least 35%, at least 40%, at least 45%, at least 50%, at least 55%, at least 60%, at least 65%, at least 70%, at least 75%, at least 80%, at least 85%, at least 90%, at least 95%, at least 100%, at least 125%, at least 150%, at least 175%, at least 200%, at least 300%, at least 400%, at least 500%, at least 600%, at least 700%, at least 800%, at least 900%, or at least 1,000%) more of one or more compounds selected from those listed in Table 3 relative to a control. In Table 3, for each compound, a may independently be 1, 2, 3, 4, 5, 6, 7, 8, 9, or 10.

[0327] In some embodiments, a PT may be capable of producing at least 1% (e.g., at least 5%, at least 10%, at least 15%, at least 20%, at least 25%, at least 30%, at least 35%, at least 40%, at least 45%, at least 50%, at least 55%, at least 60%, at least 65%, at least 70%, at least 75%, at least 800%, at least 85%, at least 90%, at least 95%, at least 100%, at least 125%, at least 150%, at least 175%, at least 200%, at least 300%, at least 400%, at least 500%, at least 600%, at least 700%, at least 800%, at least 900%, or at least 1,000%) higher titer or yield of one or more compounds selected from those listed in Table 3 relative to a control. In Table 3, for each compound, a may independently be 1, 2, 3, 4, 5, 6, 7, 8, 9, or 10.

[0328] In some embodiments, a PT may be capable of producing one or more compounds selected from Table 3 at a rate that is at least 1% (e.g., at least 5%, at least 10%, at least 15%, at least 20%, at least 25%, at least 30%, at least 35%, at least 40%, at least 45%, at least 50%, at least 55%, at least 60%, at least 65%, at least 70%, at least 75%, at least 80%, at least 85%, at least 90%, at least 95%, at least 100%, at least 125%, at least 150%, at least 175%, at least 200%, at least 300%, at least 400%, at least 500%, at least 600%, at least 700%, at least 800%, at least 90)%, or at least 1,000%) faster relative to a control. In Table 3, for each compound, a may independently be 1, 2, 3, 4, 5, 6, 7, 8, 9, or 10.

[0329] In some embodiments, a PT may be capable of producing at least 1% (e.g., at least 5%, at least 10%, at least 15%, at least 20%, at least 25%, at least 30%, at least 35%, at least 40%, at least 45%, at least 50%, at least 55%, at least 60%, at least 65%, at least 70%, at least 75%, at least 80%, at least 85%, at least 90%, at least 95%, at least 100%, at least 125%, at least 150%, at least 175%, at least 200%, at least 300%, at least 400%, at least 500%, at least 600%, at least 700%, at least 800%, at least 900%, or at least 1,000%) more of a compound of Formula (8):

[chemical structure]

relative to a control.

[0330] In some embodiments, a PT may be capable of producing at least 1% (e.g., at least 5%, at least 10%, at least 15%, at least 20%, at least 25%, at least 30%, at least 35%, at least 40%, at least 45%, at least 50%, at least 55%, at least 60%, at least 65%, at least 70%, at least 75%, at least 80%, at least 85%, at least 90%, at least 95%, at least 100%, at least 125%, at least 150%, at least 175%, at least 200%, at least 300%, at least 400%, at least 500%, at least 600%, at least 700%, at least 800%, at least 900%, or at least 1,000%) more of a compound of Formula (8a):

[chemical structure]

(cannabigerolic Acid (CBGA)) relative to a control.

[0331] In some embodiments, a PT may be capable of producing at least 1% (e.g., at least 5%, at least 10%, at least 15%, at least 20%, at least 25%, at least 30%, at least 35%, at least 40%, at least 45%, at least 50%, at least 55%, at least 60%, at least 65%, at least 70%, at least 75%, at least 80%, at least 85%, at least 90%, at least 95%, at least 100%, at least 125%, at least 150%, at least 175%, at least 200%, at least 300%, at least 400%, at least 500%, at least 600%, at least 700%, at least 800%, at least 900%, or at least 1,000%) more of a compound of Formula (8c):

[chemical structure]

relative to a control.

[0332] In some embodiments, a PT may be capable of producing at least 1% (e.g., at least 5%, at least 10%, at least 15%, at least 20%, at least 25%, at least 30%, at least 35%, at least 40%, at least 45%, at least 50%, at least 55%, at least 60%, at least 65%, at least 70%, at least 75%, at least 80%, at least 85%, at least 90%, at least 95%, at least 100%, at least 125%, at least 150%, at least 175%, at least 200%, at least 300%, at least 400%, at least 500%, at least 600%, at least 700%, at least 800%, at least 900%, or at least 1,000%) more of a compound of Formula (8b):

[chemical structure]

(2-O-Geranyl Olivetolic Acid (OGOA) relative to a control.

[0333] In some embodiments, a PT may be capable of producing at least 1% (e.g., at least 5%, at least 10%, at least 15%, at least 20%, at least 25%, at least 30%, at least 35%, at least 40%, at least 45%, at least 50%, at least 55%, at least 60%, at least 65%, at least 70%, at least 75%, at least 80%, at least 85%, at least 90%, at least 95%, at least 100%, at least 125%, at least 150%, at least 175%, at least 200%, at least 300%, at least 400%, at least 500%, at least 600%, at least 700%, at least 800%, at least 900%, or at least 1,000%) more of a compound of Formula (13):

[chemical structure]

relative to a control.

[0334] In some embodiments, a PT may be capable of producing at least 1% (e.g., at least 5%, at least 10%, at least 15%, at least 20%, at least 25%, at least 30%, at least 35%, at least 40%, at least 45%, at least 50%, at least 55%, at least 60%, at least 65%, at least 70%, at least 75%, at least 80%, at least 85%, at least 90%, at least 95%, at least 100%, at least 125%, at least 150%, at least 175%, at least 200%, at least 300%, at least 400%, at least 500%, at least 600%, at least 700%, at least 800%, at least 900%, or at least 1,000%) more of a compound of Formula (8w), Formula (8x), Formula (8′), Formula (8y), or Formula (8z):

[chemical structure]

wherein a is 1, 2, 3, 4, 5, 6, 7, 8, 9, or 10, relative to a control. In some embodiments, a PT may be capable of producing at least 1% (e.g., at least 5%, at least 10%, at least 15%, at least 20%, at least 25%, at least 30%, at least 35%, at least 40%, at least 45%, at least 50%, at least 55%, at least 60%, at least 65%, at least 70%, at least 75%, at least 80%, at least 85%, at least 90%, at least 95%, at least 100%, at least 125%, at least 150%, at least 175%, at least 200%, at least 300%, at least 400%, at least 500%, at least 600%, at least 700%, at least 800%, at least 900%, or at least 1,000%) more of a compound of Formula (8w). Formula (8x), Formula (8′), Formula (8y), or Formula (8z), wherein a is 1, 2, 3, 4, or 5, relative to a control. In certain embodiments, a is 2, 3, 4, or 5.

[0335] In some embodiments, a PT may be capable of producing at least 1% (e.g., at least 5%, at least 10%, at least 15%, at least 20%, at least 25%, at least 30%, at least 35%, at least 40%, at least 45%, at least 50%, at least 55%, at least 60%, at least 65%, at least 70%, at least 75%, at least 80%, at least 85%, at least 90%, at least 95%, at least 100%, at least 125%, at least 150%, at least 175%, at least 200%, at least 300%, at least 400%, at least 500%, at least 600%, at least 700%, at least 800%, at least 900%, or at least 1,000%) more of a compound of Formula (8′):

[chemical structure]

wherein a is 1, 2, 3, 4, 5, 6, 7, 8, 9, or 10, relative to a control.

[0336] In some embodiments, a PT may be capable of producing at least 1% (e.g., at least 5%, at least 10%, at least 15%, at least 20%, at least 25%, at least 30%, at least 35%, at least 40%, at least 45%, at least 50%, at least 55%, at least 60%, at least 65%, at least 70%, at least 75%, at least 80%, at least 85%, at least 90%, at least 95%, at least 100%, at least 125%, at least 150%, at least 175%, at least 200%, at least 300%, at least 400%, at least 500%, at least 600%, at least 700%, at least 800%, at least 900%, or at least 1.000%) less of one or more compounds selected from those listed in Table 3 relative to a control. In Table 3, for each compound, a may independently be 1, 2, 3, 4, 5, 6, 7, 8, 9, or 10.

[0337] In some embodiments, a PT may be capable of producing at least 1% (e.g., at least 5%, at least 10%, at least 15%, at least 20%, at least 25%, at least 30%, at least 35%, at least 40%, at least 45%, at least 50%, at least 55%, at least 60%, at least 65%, at least 70%, at least 75%, at least 80%, at least 85%, at least 90%, at least 95%, at least 100%, at least 125%, at least 150%, at least 175%, at least 200%, at least 300%, at least 400%, at least 500%, at least 600%, at least 700%, at least 800%, at least 900%, or at least 1,000%) less of a compound of Formula (8):

[chemical structure]

relative to a control.

[0338] In some embodiments, a PT may be capable of producing at least 1% (e.g., at least 5%, at least 10%, at least 15%, at least 20%, at least 25%, at least 30%, at least 35%, at least 40%, at least 45%, at least 50%, at least 55%, at least 60%, at least 65%, at least 70%, at least 75%, at least 80%, at least 85%, at least 90%, at least 95%, at least 100%, at least 125%, at least 150%, at least 175%, at least 200%, at least 300%, at least 400%, at least 500%, at least 600%, at least 700%, at least 800%, at least 900%, or at least 1,000%) less of a compound of Formula (8a): (cannabigerolic Acid (CBGA)) relative to a control.

[0339] In some embodiments, a PT may be capable of producing at least 1% (e.g., at least 5%, at least 10%, at least 15%, at least 20%, at least 25%, at least 30%, at least 35%, at least 40%, at least 45%, at least 50%, at least 55%, at least 60%, at least 65%, at least 70%, at least 75%, at least 80%, at least 85%, at least 90%, at least 95%, at least 100%, at least 125%, at least 150%, at least 175%, at least 200%, at least 300%, at least 400%, at least 500%, at least 600%, at least 700%, at least 800%, at least 900%, or at least 1,000%) less of a compound of Formula (8c):

[chemical structure]

relative to a control.

[0340] In some embodiments, a PT may be capable of producing at least 1% (e.g., at least 5%, at least 10%, at least 15%, at least 20%, at least 25%, at least 30%, at least 35%, at least 40%, at least 45%, at least 50%, at least 55%, at least 60%, at least 65%, at least 70%, at least 75%, at least 80%, at least 85%, at least 90%, at least 95%, at least 100%, at least 125%, at least 150%, at least 175%, at least 200%, at least 300%, at least 400%, at least 500%, at least 600%, at least 700%, at least 800%, at least 900%, or at least 1,000%) less of a compound of Formula (8b) CBGA relative to a control.

[0341] In some embodiments, a PT may be capable of producing at least 1% (e.g., at least 5%, at least 10%, at least 15%, at least 20%, at least 25%, at least 30%, at least 35%, at least 40%, at least 45%, at least 50%, at least 55%, at least 60%, at least 65%, at least 70%, at least 75%, at least 80%, at least 85%, at least 90%, at least 95%, at least 100%, at least 125%, at least 150%, at least 175%, at least 200%, at least 300%, at least 400%, at least 500%, at least 600%, at least 700%, at least 800%, at least 900%, or at least 1,000%) less of a compound of Formula (13):

[chemical structure]

relative to a control.

[0342] In some embodiments, a PT may be capable of producing at least 1% (e.g., at least 5%, at least 10%, at least 15%, at least 20%, at least 25%, at least 30%, at least 35%, at least 40%, at least 45%, at least 50%, at least 55%, at least 60%, at least 65%, at least 70%, at least 75%, at least 80%, at least 85%, at least 90%, at least 95%, at least 100%, at least 125%, at least 150%, at least 175%, at least 200%, at least 300%, at least 400%, at least 500%, at least 600%, at least 700%, at least 800%, at least 900%, or at least 1,000%) less of a compound of Formula (8w), Formula (8x), Formula (8′), Formula (8y), or Formula (8z):

[chemical structure]

wherein a is 1, 2, 3, 4, 5, 6, 7, 8, 9, or 10, relative to a control.

[0343] In some embodiments, a PT may be capable of producing at least 1% (e.g., at least 5%, at least 10%, at least 15%, at least 20%, at least 25%, at least 30%, at least 35%, at least 40%, at least 45%, at least 50%, at least 55%, at least 60%, at least 65%, at least 70%, at least 75%, at least 80%, at least 85%, at least 90%, at least 95%, at least 100%, at least 125%, at least 150%, at least 175%, at least 200%, at least 300%, at least 400%, at least 500%, at least 600%, at least 700%, at least 800%, at least 900%, or at least 1,000%) less of a compound of Formula (8′):

[chemical structure]

wherein a is 1, 2, 3, 4, 5, 6, 7, 8, 9, or 10, relative to a control.

[0344] In some embodiments, a PT may be capable of producing at least 1% (e.g., at least 5%, at least 10%, at least 15%, at least 20%, at least 25%, at least 30%, at least 35%, at least 40%, at least 45%, at least 50%, at least 55%, at least 60%, at least 65%, at least 70%, at least 75%, at least 80%, at least 85%, at least 90%, at least 95%, at least 10W %, at least 125%, at least 150%, at least 175%, at least 200%, at least 300%, at least 400%, at least 500%, at least 600%, at least 700%, at least 800%, at least 900%, or at least 1,000%) lower titer or yield of one or more compounds selected from those listed in Table 3 relative to a control. In Table 3, for each compound, a may independently be 1, 2, 3, 4, 5, 6, 7, 8, 9, or 10.

[0345] In some embodiments, a PT may be capable of producing one or more compounds selected from Table 3 at a rate that is at least 1% (e.g., at least 5%, at least 10%, at least 15%, at least 20%, at least 25%, at least 30%, at least 35%, at least 40%, at least 45%, at least 50%, at least 55%, at least 60%, at least 65%, at least 70%, at least 75%, at least 80%, at least 85%, at least 90%, at least 95%, at least 100%, at least 125%, at least 150%, at least 175%, at least 200%, at least 300%, at least 400%, at least 500%, at least 600%, at least 700%, at least 800%, at least 900%, or at least 1,000%) slower relative to a control. In Table 3, for each compound, a may independently be 1, 2, 3, 4, 5, 6, 7, 8, 9, or 10.

TABLE 3
Non-limiting examples of PT products.

| [chemical structure] | (8w) |
|---|---|
| [chemical structure] | (8x) |
| [chemical structure] | (8′) |
| [chemical structure] | (8y) |
| [chemical structure] | (8z) |
| [chemical structure] | (8a) |
| (cannabigerolic Acid (CBGA)) | |
| [chemical structure] | (8b) |
| (2-O-Geranyl Olivetolic Acid | |
| (OGOA) | |
| [chemical structure] | (13) |

[0346] In some embodiments, a control is a wild-type reference PT. A wild-type reference PT can be full-length or truncated. A wild-type reference PT can be part of a fusion protein. In some embodiments, a control is any one of SEQ ID NOs: 1-10. In some embodiments, a control is a fusion protein comprising any one of SEQ ID NOs: 1-10.

[0347] In some embodiments, a PT is capable of producing a product mixture comprising one or more of Formula (8w), Formula (8x), Formula (8′), Formula (8y), and/or Formula (8z):

[chemical structure]

resulting from the prenylation of a compound of Formula (6), shown below:

[chemical structure]

In some embodiments, at least approximately 50-100%, at least approximately 50-60%, at least approximately 60-70%, at least approximately 70-80%, at least approximately 80-90%, at least approximately 90-100%, of compounds within the product mixture are compounds of Formula (8′),

[chemical structure]

wherein a is 1, 2, 3, 4, 5, 6, 7, 8, 9, or 10.

[0348] In some embodiments, a PT is capable of producing a product mixture of prenylated products resulting from the prenylation of a compound of Formula (6), shown below:

[chemical structure]

wherein at least approximately 50-100%, at least approximately 50-60%, at least approximately 60-70%, at least approximately 70-80%, at least approximately 80-90%, or at least approximately 90-100%, of the products are compounds of Formula (8′),

[chemical structure]

wherein a is 1, 2, 3, 4, 5, 6, 7, 8, 9, or 10.

[0349] In some embodiments, a PT is capable of producing a product mixture of prenylated products resulting from the prenylation of a compound of Formula (6), shown below:

[chemical structure]

wherein at least approximately 50-100%, at least approximately 50-60%, at least approximately 60-70%, at least approximately 70-80%, at least approximately 80-90%, at least approximately 90-100%, of the products are compounds of Formula (8),

[chemical structure]

[0350] In some embodiments, a PT is capable of producing at least 1.1 times, 1.2 times, 1.3 times, 1.4 times, 1.5 times, 1.6 times, 1.7 times, 1.8 times, 1.9 times, 2 times, 2.1 times, 2.2 times, 2.3 times, 2.4 times, 2.5 times, 2.6 times, 2.7 times, 2.8 times, 2.9 times, 3 times, 3.1 times, 3.2 times, 3.3 times, 3.4 times, 3.5 times, 3.6 times, 3.7 times, 3.8 times, 3.9 times, 4 times, 5 times, 6 times, 8 times, 9 times, 10 times, 20 times, 30 times, 40 times, 50 times, 60 times, 70 times, 80 times, 90 times, 100 times, 200 times, 300 times, 400 times, 500 times, 600 times, 700 times, 800 times or 1,000 times more of a compound of Formula (8);

[chemical structure]

than a compound of Formula (13):

[chemical structure]

[0351] In some embodiments, a PT is capable of producing at least 1.1 times, 1.2 times, 1.3 times, 1.4 times, 1.5 times, 1.6 times, 1.7 times, 1.8 times, 1.9 times, 2 times, 2.1 times, 2.2 times, 2.3 times, 2.4 times, 2.5 times, 2.6 times, 2.7 times, 2.8 times, 2.9 times, 3 times, 3.1 times, 3.2 times, 3.3 times, 3.4 times, 3.5 times, 3.6 times, 3.7 times, 3.8 times, 3.9 times, 4 times, 5 times, 6 times, 8 times, 9 times, 10 times, 20 times, 30 times, 40 times, 50 times, 60 times, 70 times, 80 times, 90 times, 100 times, 200 times, 300 times, 400 times, 500 times, 600 times, 700 times, 800 times or 1,000 times more of a compound of Formula (8a):

[chemical structure]

than a compound of Formula (8b):

[chemical structure]

[0352] In some embodiments, a PT is capable of producing at least 1.1 times, 1.2 times, 1.3 times, 1.4 times, 1.5 times, 1.6 times, 1.7 times, 1.8 times, 1.9 times, 2 times, 2.1 times, 2.2 times, 2.3 times, 2.4 times, 2.5 times, 2.6 times, 2.7 times, 2.8 times, 2.9 times, 3 times, 3.1 times, 3.2 times, 3.3 times, 3.4 times, 3.5 times, 3.6 times, 3.7 times, 3.8 times, 3.9 times, 4 times, 5 times, 6 times, 8 times, 9 times, 10 times, 20 times, 30 times, 40 times, 50 times, 60 times, 70 times, 80 times, 90 times, 100 times, 200 times, 300 times, 400 times, 500 times, 600 times, 700 times, 800 times or 1,000 times more of a compound of Formula (13):

[chemical structure]

than a compound of Formula (8):

[chemical structure]

[0353] In some embodiments, a PT is capable of producing at least 1.1 times, 1.2 times, 1.3 times, 1.4 times, 1.5 times, 1.6 times, 1.7 times, 1.8 times, 1.9 times, 2 times, 2.1 times, 2.2 times, 2.3 times, 2.4 times, 2.5 times, 2.6 times, 2.7 times, 2.8 times, 2.9 times, 3 times, 3.1 times, 3.2 times, 3.3 times, 3.4 times, 3.5 times, 3.6 times, 3.7 times, 3.8 times, 3.9 times, 4 times, 5 times, 6 times, 8 times, 9 times, 10 times, 20 times, 30 times, 40 times, 50 times, 60 times, 70 times, 80 times, 90 times, 100 times, 200 times, 300 times, 400 times, 500 times, 600 times, 700 times, 800 times or 1.000 times more of a compound of Formula (8b):

[chemical structure]

than a compound of Formula (8a):

[chemical structure]

f. Solubility

[0354] The C. sativa Cannabigerolic Acid Synthase (CBGAS) enzyme is an integral membrane enzyme that converts olivetolic acid (OA) and geranyl pyrophosphate (GPP) to Cannabigerolic Acid (CBGA) (R4a in FIG. 1, Fellermeier and Zenk FEBS Letters, 1998, Page and Boubakir US 20120144523, 2012, and Luo et al. Nature, 2019). Expression of heterologous membrane proteins can be challenging due to, for example, failure of the protein to refold into a functional protein, accumulation in the cytoplasmic membrane or cytoplasmic inclusion bodies, saturation of the protein sorting and translocation machineries, integrity of the cellular membrane, and/or cellular toxicity (e.g., Wagner et al. Molecular & Cellular Proteomics (2007) 6(9): 1527-1550).

[0355] Functional expression of paralog C. sativa CBGAS enzymes in S. cerevisiae and production of the major cannabinoid CBGA has been reported (Page and Boubakir US 20120144523, 2012, and Luo et al. Nature, 2019). Luo et al. reported the production of CBGA in S. cerevisiae by expressing a truncated version of a C. sativa CBGAS, CsPT4, with its native signal peptide removed (Luo et al. Nature, 2019). Without being bound by a particular theory, the integral-membrane nature of C. sativa CBGAS enzymes may render functional expression of C. sativa CBGAS enzymes in heterologous hosts challenging. Removal of transmembrane domain(s) or signal sequences or use of prenyltransferases that are not associated with the membrane and are not integral membrane proteins may facilitate increased interaction between the enzyme and available substrate, for example in the cellular cytosol and/or in organelles that may be targeted using peptides that confer localization.

[0356] In some embodiments, the PT is a soluble PT. In some embodiments, the PT is a cytosolic PT. In some embodiments, the PT is a secreted protein. In some embodiments, the PT is not a membrane-associated protein. In some embodiments, the PT is not an integral membrane protein. In some embodiments, the PT does not comprise a transmembrane domain or a predicted transmembrane domain. In some embodiments, the PT may be primarily detected in the cytosol (e.g., detected in the cytosol to a greater extent than detected associated with the cell membrane). In some embodiments, the PT is a protein from which one or more transmembrane domains have been removed and/or mutated (e.g., by truncation, deletions, substitutions, insertions, and/or additions) so that the PT localizes or is predicted to localize in the cytosol of the host cell, or to cytosolic organelles within the host cell, or, in the case of bacterial hosts, in the periplasm. In some embodiments, the PT is a protein from which one or more transmembrane domains have been removed or mutated (e.g., by truncation, deletions, substitutions, insertions, and/or additions) so that the PT has increased localization to the cytosol, organelles, or periplasm of the host cell, as compared to membrane localization.

[0357] Within the scope of the term “transmembrane domains” are predicted or putative transmembrane domains in addition to transmembrane domains that have been empirically determined. In general, transmembrane domains are characterized by a region of hydrophobicity that facilitates integration into the cell membrane. Methods of predicting whether a protein is a membrane protein or a membrane-associated protein are known in the art and may include, for example amino acid sequence analysis, hydropathy plots, and/or protein localization assays.

[0358] In some embodiments, the PT is a protein from which a signal sequence has been removed and/or mutated such that the PT is not directed to the cellular secretory pathway. In some embodiments, the PT is a protein from which a signal sequence has been removed and/or mutated such that the PT is localized to the cytosol or has increased localization to the cytosol (e.g., as compared to the secretory pathway).

[0359] In general, signal sequences, also referred to, for example, as “signal peptides,” are comprised of about 15-30 amino acid and direct a newly translated protein to the cellular secretory pathway. Within the scope of the term “signal sequences” are predicted or putative signal sequences in addition to signal sequences that have been empirically determined.

[0360] In some embodiments, the PT is a secreted protein. In some embodiments, the PT contains a signal sequence.

### Additional Cannabinoid Pathway Enzymes

[0361] Methods for production of cannabinoids and cannabinoid precursors can further include expression of one or more of: an Acyl Activating Enzyme (AAE): a polyketide synthase (PKS) (e.g., OLS); an Olivetolic acid cyclase (OAC); and a terminal synthase (TS).

### Acyl Activating Enzyme (AAE)

[0362] A host cell described in this disclosure may comprise an acyl activating enzyme (AAE). As used in this disclosure, an acyl activating enzyme (AAE) refers to an enzyme that is capable of catalyzing the esterification between a thiol and a substrate (e.g., optionally substituted aliphatic or aryl group) that has a carboxylic acid moiety. In some embodiments, an AAE is capable of using Formula (1):

[chemical structure]

or a salt, solvate, hydrate, polymorph, co-crystal, tautomer, stereoisomer, isotopically labeled derivative thereof to produce a product of Formula (2):

[chemical structure]

[0363] R is as defined in this application. In certain embodiments, R is hydrogen. In certain embodiments, R is optionally substituted alkyl. In certain embodiments, R is optionally substituted C1-40 alkyl. In certain embodiments, R is optionally substituted C2-40 alkyl. In certain embodiments, R is optionally substituted C2-40 alkyl, which is straight chain or branched alkyl. In certain embodiments, R is optionally substituted C2-10 alkyl, optionally substituted C10-C20 alkyl, optionally substituted C20-C30 alkyl, optionally substituted C30-C40 alkyl, or optionally substituted C40-C50 alkyl, which is straight chain or branched alkyl. In certain embodiments, R is optionally substituted C3-8 alkyl. In certain embodiments, R is optionally substituted C1-C40 alkyl, C1-C20 alkyl, C1-C110 alkyl, C1-C8 alkyl, C1-C5 alkyl, C3-C5 alkyl, C3 alkyl, or C5 alkyl. In certain embodiments, R is optionally substituted C1-C20 alkyl. In certain embodiments, R is optionally substituted C1-C20 branched alkyl. In certain embodiments, R is optionally substituted C1-C20 alkyl, optionally substituted C1-C10 alkyl, optionally substituted C10-C20 alkyl, optionally substituted C20-C30 alkyl, optionally substituted C30-C40 alkyl, or optionally substituted C40-C50 alkyl. In certain embodiments, R is optionally substituted C1-C10 alkyl. In certain embodiments, R is optionally substituted C3 alkyl. In certain embodiments, R is optionally substituted n-propyl. In certain embodiments, R is unsubstituted n-propyl. In certain embodiments, R is optionally substituted C1-C8 alkyl. In some embodiments, R is a C2-C6 alkyl. In certain embodiments, R is optionally substituted C1-C5 alkyl. In certain embodiments, R is optionally substituted C3-C5 alkyl. In certain embodiments, R is optionally substituted C3 alkyl. In certain embodiments, R is optionally substituted C5 alkyl. In certain embodiments, R is of formula:

[chemical structure]

In certain embodiments, R is of formula:

[chemical structure]

In certain embodiments, R is of formula:

[chemical structure]

In certain embodiments, R is of formula:

[chemical structure]

In certain embodiments, R is optionally substituted propyl. In certain embodiments, R is optionally substituted n-propyl. In certain embodiments, R is n-propyl optionally substituted with optionally substituted aryl. In certain embodiments, R is n-propyl optionally substituted with optionally substituted phenyl. In certain embodiments, R is n-propyl substituted with unsubstituted phenyl. In certain embodiments, R is optionally substituted butyl. In certain embodiments, R is optionally substituted n-butyl. In certain embodiments, R is n-butyl optionally substituted with optionally substituted aryl. In certain embodiments, R is n-butyl optionally substituted with optionally substituted phenyl. In certain embodiments, R is n-butyl substituted with unsubstituted phenyl. In certain embodiments, R is optionally substituted pentyl. In certain embodiments, R is optionally substituted n-pentyl. In certain embodiments, R is n-pentyl optionally substituted with optionally substituted aryl. In certain embodiments, R is n-pentyl optionally substituted with optionally substituted phenyl. In certain embodiments, R is n-pentyl substituted with unsubstituted phenyl. In certain embodiments, R is optionally substituted hexyl. In certain embodiments, R is optionally substituted n-hexyl. In certain embodiments, R is optionally substituted n-heptyl. In certain embodiments, R is optionally substituted n-octyl. In certain embodiments, R is alkyl optionally substituted with aryl (e.g., phenyl). In certain embodiments, R is optionally substituted acyl (e.g., —C(═O)Me).

[0364] In certain embodiments, R is optionally substituted alkenyl (e.g., substituted or unsubstituted C₂₋₆ alkenyl). In certain embodiments, R is substituted or unsubstituted C₂₋₆ alkenyl. In certain embodiments, R is substituted or unsubstituted C₂₋₅ alkenyl. In certain embodiments, R is of formula:

[chemical structure]

In certain embodiments, R is optionally substituted alkynyl (e.g., substituted or unsubstituted C₂₋₆ alkynyl). In certain embodiments, R is substituted or unsubstituted C₂₋₆ alkynyl. In certain embodiments, R is of formula:

[chemical structure]

In certain embodiments, R is optionally substituted carbocyclyl. In certain embodiments, R is optionally substituted aryl (e.g., phenyl or napthyl).

[0365] In some embodiments, a substrate for an AAE is produced by fatty acid metabolism within a host cell. In some embodiments, a substrate for an AAE is provided exogenously.

[0366] In some embodiments, an AAE is capable of catalyzing the formation of hexanoyl-coenzyme A (hexanoyl-CoA) from hexanoic acid and coenzyme A (CoA). In some embodiments, an AAE is capable of catalyzing the formation of butanoyl-coenzyme A (butanoyl-CoA) from butanoic acid and coenzyme A (CoA).

[0367] As one of ordinary skill in the art would appreciate, an AAE could be obtained from any source, including naturally occurring sources and synthetic sources (e.g., a non-naturally occurring AAE). In some embodiments, an AAE is a Cannabis enzyme. Non-limiting examples of AAEs include C. sativa hexanoyl-CoA synthetase 1 (CsHCS1) and C. sativa hexanoyl-CoA synthetase 2 (CsHCS2) as disclosed in U.S. Pat. No. 9,546,362, which is incorporated by reference in this application in its entirety.

[0368] CsHCS1 has the sequence:

(SEQ ID NO: 636)
MGKNYKSLDSVVASDFIALGITSEVAETLHGRLAEIVCNYGAATPQTWI
NIANHILSPDLPFSLHQMLFYGCYKDFGPAPPAWIPDPEKVKSTNLGAL
LEKRGKEFLGVKYKDPISSFSHFQEFSVRNPEVYWRTVLMDEMKISFSK
DPECILRRDDINNPGGSEWLPGGYLNSAKNCLNVNSNKKLNDTMIVWRD
EGNDDLPLNKLTLDQLRKRVWLVGYALEEMGLEKGCAIAIDMPMHVDAV
VIYLAIVLAGYVVVSIADSFSAPEISTRLRLSKAKAIFTQDHIIRGKKR
IPLYSRVVEAKSPMAIVIPCSGSNIGAELRDGDISWDYFLERAKEFKNC
EFTAREQPVDAYTNILFSSGTTGEPKAIPWTQATPLKAAADGWSHLDIR
KGDVIVWPTNLGWMMGPWLVYASLLNGASIALYNGSPLVSGFAKFVQDA
KVTMLGVVPSIVRSWKSTNCVSGYDWSTIRCFSSSGEASNVDEYLWLMG
RANYKPVIEMCGGTEIGGAFSAGSFLQAQSLSSFSSQCMGCTLYILDKN
GYPMPKNKPGIGELALGPVMFGASKTLLNGNHHDVYFKGMPTLNGEVLR
RHGDIFELTSNGYYHAHGRADDTMNIGGIKISSIEIERVCNEVDDRVFE
TTAIGVPPLGGGPEQLVIFFVLKDSNDTTIDLNQLRLSFNLGLQKKLNP
LFKVTRVVPLSSLPRTATNKIMRRVLRQFSHFE.

[0369] CsHCS2 has the sequence:

(SEQ ID NO: 637)
MEKSGYGRDGIYRSLRPPLHLPNNNNLSMVSFLFRNSSSYPQKPALIDS
ETNQILSFSHFKSTVIKVSHGFLNLGIKKNDVVLIYAPNSIHFPVCFLG
IIASGAIATTSNPLYTVSELSKQVKDSNPKLIITVPQLLEKVKGFNLPT
ILIGPDSEQESSSDKVMTENDLVNLGGSSGSEFPIVDDFKQSDTAALLY
SSGTTGMSKGVVLTHKNFIASSLMVTMEQDLVGEMDNVFLCFLPMFHVF
GLAIITYAQLQRGNTVISMARFDLEKMLKDVEKYKVTHLWVVPPVILAL
SKNSMVKKFNLSSIKYIGSGAAPLGKDLMEECSKVVPYGIVAQGYGMTE
TCGIVSMEDIRGGKRNSGSAGMLASGVEAQIVSVDTLKPLPPNQLGEIW
VKGPNMMQGYFNNPQATKLTIDKKGWVHTGDLGYFDEDGHLYVVDRIKE
LIKYKGFQVAPAELEGLLVSHPEILDAVVIPFPDAEAGEVPVAYVVRSP
NSSLTENDVKKFIAGQVASFKRLRKVTFINSVPKSASGKILRRELIQKV
RSNM.

[0370] Additional AAE enzymes are disclosed in, and incorporated by reference from, PCT Publication No. WO2020/176547 and U.S. Patent Publication No. 2021/0071209, both of which are entitled “BIOSYNTHESIS OF CANNABINOIDS AND CANNABINOID PRECURSORS, and each of which is incorporated by reference in its entirety.

### Polyketide Synthases (PKS)

[0371] A host cell described in this application may comprise a PKS. As used in this application, a “PKS” refers to an enzyme that is capable of producing a polyketide. In certain embodiments, a PKS converts a compound of Formula (2) to a compound of Formula (4), (5), and/or (6). In certain embodiments, a PKS converts a compound of Formula (2) to a compound of Formula (4). In certain embodiments, a PKS converts a compound of Formula (2) to a compound of Formula (5). In certain embodiments, a PKS converts a compound of Formula (2) to a compound of Formula (4) and/or (5). In certain embodiments, a PKS converts a compound of Formula (2) to a compound of Formula (5) and/or (6).

[0372] In some embodiments, a PKS is a tetraketide synthase (TKS). In certain embodiments, a PKS is an olivetol synthase (OLS). As used in this application, an “OLS” refers to an enzyme that is capable of using a substrate of Formula (2a) to form a compound of Formula (4a), (5a) or (6a) as shown in FIG. 1.

[0373] In certain embodiments, a PKS is a divarinic acid synthase (DVS).

[0374] In certain embodiments, polyketide synthases can use hexanoyl-CoA or any acyl-CoA (or a product of Formula (2):

[chemical structure]

and three malonyl-CoAs as substrates to form 3,5,7-trioxododecanoyl-CoA or other 3,5,7-trioxo-acyl-CoA derivatives; or to form a compound of Formula (4):

[chemical structure]

wherein R is hydrogen, optionally substituted acyl, optionally substituted alkyl, optionally substituted alkenyl, optionally substituted alkynyl, optionally substituted carbocyclyl, or optionally substituted aryl; depending on substrate. R is as defined in this application. In some embodiments, R is a C2-C6 optionally substituted alkyl. In some embodiments, R is a propyl or pentyl. In some embodiments, R is pentyl. In some embodiments, R is propyl. A PKS may also bind isovaleryl-CoA, octanoyl-CoA, hexanoyl-CoA, and butyryl-CoA. In some embodiments, PKS is capable of catalyzing the formation of a 3,5,7-trioxoalkanoyl-CoA (e.g. 3,5,7-trioxododecanoyl-CoA). In some embodiments, an OLS is capable of catalyzing the formation of a 3,5,7-trioxoalkanoyl-CoA (e.g. 3,5,7-trioxododecanoyl-CoA).

[0375] In some embodiments, a PKS uses a substrate of Formula (2) to form a compound of Formula (4):

[chemical structure]

wherein R is unsubstituted pentyl.

[0376] As one of ordinary skill in the art would appreciate a PKS, such as an OLS, could be obtained from any source, including naturally occurring sources and synthetic sources (e.g., a non-naturally occurring PKS). In some embodiments a PKS is from Cannabis. In some embodiments a PKS is from Dictyostelium. Non-limiting examples of PKS enzymes may be found in U.S. Pat. No. 6,265,633; PCT Publication No. WO2018/148848 A1; PCT Publication No. WO2018/148849 A1; and U.S. Patent Publication No. 2018/155748, which are incorporated by reference in this application in their entireties.

[0377] A non-limiting example of an OLS is provided by UniProtKB—B1Q2B6 from C. sativa. In C. sativa, this OLS uses hexanoyl-CoA and malonyl-CoA as substrates to form 3,5,7-trioxododecanoyl-CoA. OLS (e.g., UniProtKB—B1Q2B6) in combination with olivetolic acid cyclase (OAC) produces olivetolic acid (OA) in C. sativa.

[0378] The amino acid sequence of UniProtKB—B1Q2B6 is:

(SEQ ID NO: 638)
MNHLRAEGPASVLAIGTANPENILLQDEFPDYYFRVTKSEHMTQLKEKF
RKICDKSMIRKRNCFLNEEHLKQNPRLVEHEMQTLDARQDMLVVEVPKL
GKDACAKAIKEWGQPKSKITHLIFTSASTTDMPGADYHCAKLLGLSPSV
KRVMMYQLGCYGGGTVLRIAKDIAENNKGARVLAVCCDIMACLFRGPSE
SDLELLVGQAIFGDGAAAVIVGAEPDESVGERPIFELVSTGQTILPNSE
GTIGGHIREAGLIFDLHKDVPMLISNNIEKCLIEAFTPIGISDWNSIFW
ITHPGGKAILDKVEEKLHLKSDKFVDSRHVLSEHGNMSSSTVLFVMDEL
RKRSLEEGKSTTGDGFEWGVLFGFGPGLTVERVVVRSVPIKY.

[0379] Additional PKS enzymes are disclosed in, and incorporated by reference from, PCT Publication No. WO2020/176547 and U.S. Patent Publication No. 2021/0071209, both of which are entitled “BIOSYNTHESIS OF CANNABINOIDS AND CANNABINOID PRECURSORS, and each of which is incorporated by reference in its entirety.

[0380] In some embodiments, the PKS comprises the sequence of SEQ ID NO: 1183:

(SEQ ID NO: 1183)
MPSLESVKKSNRADGFASILAIGRANPENFIEQSTYPDFFFRVINSEHLVN
LKKKFQRICDKTAIRKRHFVWNEELLNANPCLGTFMDNSLNVRQEFAIREI
PKLGAEAATKAIQEWGQPKSRITHLIFCTTSGMDLPGADYQLTQILGLNPN
IERVMLYQQGCFAGGTTLRLAKCLAESRKGARVLVVCAETTAVLFRAPSEE
HQDDLVTQALFADGASALIVGADPDETAHERASFVIVSTSQVLLPDSAGAI
GGHVSEGGLIATLHRDVPQIVSKNVGKCLEEAFTPLGISDWNSIFWVPHPG
GRAILDQVEERVGLKPEKLIVSRHVLAEYGNMSSVCVHFALDEMRKRSKKE
GKATTGEGLDWGVLFGFGPGLTVETVVLHSVPI.

[0381] In some embodiments, the PKS is encoded by a nucleic acid sequence comprising the sequence of SEQ ID NO: 1184:

(SEQ ID NO: 1184)
atgcccagtttagagtcagttaagaaatccaatcgtgccgacggcttcgca
tcgattctggctataggtagagctaaccctgaaaactttatcgaacagtct
acatatccagatttctttttcagagtcaccaatagcgaacaccttgtaaac
ctaaagaaaaagttccaaagaatttgcgacaagactgctatcaggaagcgt
cattttgtgtggaacgaagaattgttgaatgccaacccatgtttgggtacg
tttatggataactcattaaacgtcagacaagaatttgctattagagagatt
ccaaaactaggtgctgaagctgccactaaggcaatccaagaatggggtcaa
ccaaagtccagaataacccacttgatcttctgtactacctctggaatggat
ttgccaggtgctgactaccaattgacccaaattctgggtttgaatcctaat
attgagagggttatgttataccagcaaggttgtttcgctggtggtactact
ttgagattggccaaatgtttagccgaatctcgtaagggagctagagttttg
gttgtctgtgctgaaacaaccgctgttctattcagagcaccttccgaagaa
catcaagatgatttagtaactcaagctttgttcgccgacggtgcttctgct
cttatcgttggtgcagacccagacgagactgcccacgaaagagctagtttt
gttattgtctctacatctcaagtcttgttaccagatagcgctggtgctatc
ggcggtcatgtgtccgaaggtggtttgatcgccactttgcacagagatgtt
ccacagatagttagcaaaaatgtcggtaagtgcttggaagaagcattcacc
cccttgggtattagtgattggaacagtattttttgggttccacacccagga
ggtagagctattcttgaccaagtggaagaaagagtcggtttaaagcctgag
aagttgatcgtatccagacatgtgttagccgaatatggcaacatgtcttct
gtttgtgttcactttgctctggatgaaatgaggaagagatctaaaaaagaa
ggtaaggctacaaccggtgagggtttagactggggtgttttgttcggcttc
ggtccaggattaactgtcgaaaccgtcgttttgcactctgttccaatata
a.

[0382] In some embodiments, a PKS comprises a protein or nucleic acid sequence that is at least 5%, at least 10%, at least 15%, at least 20%, at least 25%, at least 30%, at least 35%, at least 40%, at least 45%, at least 50%, at least 55%, at least 60%, at least 65%, at least 70%, at least 71%, at least 72%, at least 73%, at least 74%, at least 75%, at least 76%, at least 77%, at least 78%, at least 79%, at least 80%, at least 81%, at least 82%, at least 83%, at least 84%, at least 85%, at least 86%, at least 87%, at least 88%, at least 89%, at least 90%, at least 91%, at least 92%, at least 93%, at least 94%, at least 95%, at least 96%, at least 97%, at least 98%, at least 99%, or is 100% identical, including all values in between, to SEQ ID NO: 1183 or 1184.

[0383] PKS enzymes described in this application may or may not have cyclase activity. In some embodiments where the PKS enzyme does not have cyclase activity, one or more exogenous polynucleotides that encode a polyketide cyclase (PKC) enzyme may also be co-expressed in the same host cells to enable conversion of hexanoic acid or butyric acid or other fatty acid conversion into olivetolic acid or divarinolic acid or other precursors of cannabinoids. In some embodiments, the PKS enzyme and a PKC enzyme are expressed as separate distinct enzymes. In some embodiments, a PKS enzyme that lacks cyclase activity and a PKC are linked as part of a fusion polypeptide that is a bifunctional PKS. In some embodiments, a bifunctional PKC is referred to as a bifunctional PKS-PKC. In some embodiments, a bifunctional PKC is a bifunctional tetraketide synthase (TKS-TKC). As used in this application, a bifunctional PKS is an enzyme that is capable of producing a compound of Formula (6):

[chemical structure]

from a compound of Formula (2):

[chemical structure]

and a compound of Formula (3):

[chemical structure]

In some embodiments, a PKS produces more of a compound of Formula (6):

[chemical structure]

as compared to a compound of Formula (5):

[chemical structure]

As a non-limiting example, a compound of Formula (6):

[chemical structure]

is olivetolic acid (Formula (6a)):

[chemical structure]

As a non-limiting example, a compound of Formula (5):

[chemical structure]

is olivetol (Formula (5a)):

[chemical structure]

[0384] In some embodiments, a polyketide synthase of the present disclosure is capable of catalyzing a compound of Formula (2):

[chemical structure]

and a compound of Formula (3):

[chemical structure]

to produce a compound of Formula (4):

[chemical structure]

and also further catalyzes a compound of Formula (4):

[chemical structure]

to produce a compound of Formula (6):

[chemical structure]

In some embodiments, the PKS is not a fusion protein. In some embodiments, a PKS is capable of catalyzing a compound of Formula (2):

[chemical structure]

and a compound of Formula (3):

[chemical structure]

to produce a compound of Formula (4):

[chemical structure]

and is also capable of further catalyzing the production of a compound of Formula (6):

[chemical structure]

from the compound of Formula (4):

[chemical structure]

is preferred because it avoids the need for an additional polyketide cyclase to produce a compound of Formula (6):

[chemical structure]

In some embodiments, such an enzyme that is a bifunctional PKS eliminates the transport considerations needed with addition of a polyketide cyclase, whereby the compound of Formula (4), being the product of the PKS, must be transported to the PKS for use as a substrate to be converted into the compound of Formula (6).

[0385] In some embodiments, a PKS is capable of producing olivetolic acid in the presence of a compound of Formula (2a):

[chemical structure]

### and Formula (3a):

[chemical structure]

[0387] In some embodiments, an OLS is capable of producing olivetolic acid in the presence of a compound of Formula (2a):

[chemical structure]

### and Formula (3a):

[chemical structure]

### Polyketide Cyclase (PKC)

[0389] A host cell described in this disclosure may comprise a PKC. As used in this application, a “PKC” refers to an enzyme that is capable of cyclizing a polyketide.

[0390] In certain embodiments, a polyketide cyclase (PKC) catalyzes the cyclization of an oxo fatty acyl-CoA (e.g., a compound of Formula (4):

[chemical structure]

[0391] or 3,5,7-trioxododecanoyl-COA, 3,5,7-trioxodecanoyl-COA) to the corresponding intramolecular cyclization product (e.g., compound of Formula (6), including olivetolic acid and divarinic acid). In some embodiments, a PKC catalyzes the formation of a compound which occurs in the presence of a PKS. PKC substrates include trioxoalkanol-CoA, such as 3,5,7-Trioxododecanoyl-CoA, or a compound of Formula (4):

[chemical structure]

wherein R is hydrogen, optionally substituted acyl, optionally substituted alkyl, optionally substituted alkenyl, optionally substituted alkynyl, optionally substituted carbocyclyl, or optionally substituted aryl. In certain embodiments, a PKC catalyzes a compound of Formula (4):

[chemical structure]

wherein R is hydrogen, optionally substituted acyl, optionally substituted alkyl, optionally substituted alkenyl, optionally substituted alkynyl, optionally substituted carbocyclyl, or optionally substituted aryl; to form a compound of Formula (6):

[chemical structure]

wherein R is hydrogen, optionally substituted acyl, optionally substituted alkyl, optionally substituted alkenyl, optionally substituted alkynyl, optionally substituted carbocyclyl, or optionally substituted aryl; as substrates. R is as defined in this application. In some embodiments, R is a C2-C6 optionally substituted alkyl. In some embodiments, R is a propyl or pentyl. In some embodiments, R is pentyl. In some embodiments, R is propyl. In certain embodiments, a PKC is an olivetolic acid cyclase (OAC).

[0392] In some embodiments, a PKC is an OAC. As used in this application, an “OAC” refers to an enzyme that is capable of catalyzing the formation of olivetolic acid (OA). In some embodiments, an OAC is an enzyme that is capable of using a substrate of Formula (4a) (3,5,7-trioxododecanoyl-CoA):

[chemical structure]

to form a compound of Formula (6a) (olivetolic acid):

[chemical structure]

[0393] Olivetolic acid cyclase from C. sativa (CsOAC) is a 101 amino acid enzyme that performs non-decaboxylative cyclization of the tetraketide product of olivetol synthase (FIG. 4 Structure 4a) via aldol condensation to form olivetolic acid (FIG. 4 Structure 6a). CsOAC was identified and characterized by Gagne et al. (PNAS 2012) via transcriptome mining, and its cyclization function was recapitulated in vitro to demonstrate that CsOAC is required for formation of olivetolic acid in C. sativa. A crystal structure of the enzyme was published by Yang et al. (FEBS J. 2016 March; 283(6):1088-106), which revealed that the enzyme is a homodimer and belongs to the α+β barrel (DABB) superfamily of protein folds. CsOAC is the only known plant polyketide cyclase. Multiple fungal Type III polyketide synthases have been identified that perform both polyketide synthase and cyclization functions (Funa et al., J Biol Chem. 2007 May 11; 282(19):14476-81); however, in plants such a dual function enzyme has not yet been discovered.

[0394] A non-limiting example of an amino acid sequence of an OAC in C. sativa is provided by UniProtKB—I6WU39 (SEQ ID NO: 639), which catalyzes the formation of olivetolic acid (OA) from 3,5,7-Trioxododecanoyl-CoA.

[0395] The sequence of UniProtKB—I6WU39 (SEQ ID NO: 639) is:

MAVKHLIVLKFKDEITEAQKEEFFKTYVNLVNIIPAMKDVYWGKDVTQKNK
EEGYTHIVEVTFESVETIQDYIIHPAHVGFGDVYRSFWEKLLIFDYTPRK.

[0396] A non-limiting example of a nucleic acid sequence encoding C saliva OAC is:

(SEQ ID NO: 640)
atggcagtgaagcatttgattgtattgaagttcaaagatgaaatcacagaa
gcccaaaaggaagaatttttcaagacgtatgtgaatcttgtgaatatcatc
ccagccatgaaagatgtatactggggtaaagatgtgactcaaaagaataag
gaagaagggtacactcacatagttgaggtaacatttgagagtgtggagact
attcaggactacattattcatcctgcccatgttggatttggagatgtctat
cgttctttctgggaaaaacttctcatttttgactacacaccacgaaag.

[0397] In certain embodiments, a PKC is a divarinic acid cyclase (DAC).

[0398] As one of ordinary skill in the art would appreciate a PKC could be obtained from any source including naturally occurring sources and synthetic sources (e.g., a non-naturally occurring PKC). In some embodiments, a PKC is from Cannabis. Non-limiting examples of PKCs include those disclosed in U.S. Pat. Nos. 9,611,460; 10,059,971; and U.S. Patent Publication No. 2019/0169661, which are incorporated by reference in this application in their entireties.

### Terminal Synthases (TS)

[0399] A host cell described in this application may comprise a terminal synthase (TS). As used in this application, a “TS” refers to an enzyme that is capable of catalyzing oxidative cyclization of a prenyl moiety (e.g., terpene) to produce a ring-containing product (e.g., heterocyclic ring-containing product). In certain embodiments, a TS is capable of catalyzing oxidative cyclization of a prenyl moiety (e.g., terpene) to produce a carbocyclic-ring containing product (e.g., cannabinoid). In certain embodiments, a TS is capable of catalyzing oxidative cyclization of a prenyl moiety (e.g., terpene) to produce a heterocyclic-ring containing product (e.g., cannabinoid). In certain embodiments, a TS is capable of catalyzing oxidative cyclization of a prenyl moiety (e.g., terpene) to produce a cannabinoid. In some embodiments, a terminal synthase is a terpene cyclase that uses a terpenophenolic compound as a substrate.

[0400] In some embodiments, a TS is a tetrahydrocannabinolic acid synthase (THCAS), a cannabidiolic acid synthase (CBDAS), and/or a cannabichromenic acid synthase (CBCAS). As one of ordinary skill in the art would appreciate a TS could be obtained from any source, including naturally occurring sources and synthetic sources (e.g., a non-naturally occurring TS).

### A. Substrates

[0401] A TS may be capable of using one or more substrates. In some instances, the location of the prenyl group and/or the R group differs between TS substrates. For example, a TS may be capable of using as a substrate one or more compounds of Formula (8w), Formula (8x), Formula (8′), Formula (8y), and/or Formula (8z):

[chemical structure]

or a pharmaceutically acceptable salt, solvate, hydrate, polymorph, co-crystal, tautomer, stereoisomer, isotopically labeled derivative, or prodrug thereof, wherein a is 1, 2, 3, 4, 5, 6, 7, 8, 9, or 10.

[0402] In certain embodiments, a compound of Formula (8′) is a compound of Formula (8):

[chemical structure]

[0403] In some embodiments, a TS catalyzes oxidative cyclization of the prenyl moiety (e.g., terpene) of a compound of Formula (8) described in this application and shown in FIG. 2. In certain embodiments, a compound of Formula (8) is a compound of Formula (8a):

[chemical structure]

### B. Products

[0404] In embodiments wherein CBGA is the substrate, the TS enzymes CBDAS, THCAS and CBCAS would generally catalyze the formation of cannabidiolic acid (CBDA), Δ9-tetrahydrocannabinolic acid (THCA) and cannabichromenic acid (CBCA), respectively. However, in some embodiments, a TS can produce more than one different product depending on reaction conditions. For example, the pH of the reaction environment may cause a THCAS or a CBDAS to produce CBCA in greater proportions than THCA or CBDAS, respectively (see, for example, U.S. Pat. No. 9,359,625 to Winnicki and Donsky, incorporated by reference in its entirety). In some embodiments, a TS has a predetermined product specificity in intracellular conditions, such as cytosolic conditions or organelle conditions. By expressing a TS with a predetermined product specificity based on intracellular conditions, in vivo products produced by a cell expressing the TS may be more predictably produced. In some embodiments, a TS produces a desired product at a pH of 5.5. In some embodiments, a TS produces a desired product at a pH of 1, 2, 3, 4, 5, 6, 7, 8, 9, 10, 11, 12, 13 or 14. In some embodiments, a TS produces a desired product at a pH that is between 4.5 and 8.0. In some embodiments, a TS produces a desired product at a pH that is between 5 and 6. In some embodiments, a TS produces a desired product at a pH that is around 4.5, 4.6, 4.7, 4.8, 4.9, 5.0, 5,1, 5.2, 5.3, 5.4, 5.5, 5.6, 5.7, 5.8, 5.9, 6.0, 6.1, 6.2, 6.3, 6.4, 6.5, 6.6, 6.7, 6.8, 6.9, 7.0, 7.1, 7.2, 7.3, 7.4, 7.5, 7.6, 7.7, 7.8, 7.9, or 8.0, including all values in between. In some embodiments, the product profile of a TS is dependent on the TS's signal peptide because the signal peptide targets the TS to a particular intracellular location having particular intracellular conditions (e.g. a particular organelle) that regulate the type of product produced by the TS.

[0405] A TS may be capable of using one or more substrates described in this application to produce one or more products. Non-limiting example of TS products are shown in Table 1. In some instances, a TS is capable of using one substrate to produce 1, 2, 3, 4, 5, 6, 7, 8, 9, or 10 different products. In some embodiments, a TS is capable of using more than one substrate to produce 1, 2, 3, 4, 5, 6, 7, 8, 9, or 10 different products.

[0406] In some embodiments, a TS is capable of producing a compound of Formula (X-A) and/or a compound of Formula (X-B):

[chemical structure]

or a pharmaceutically acceptable salt, solvate, hydrate, polymorph, co-crystal, tautomer, stereoisomer, isotopically labeled derivative, or prodrug thereof;
wherein [symbol] is a double bond or a single bond, as valency permits;
[0407] R is hydrogen, optionally substituted acyl, optionally substituted alkyl, optionally substituted alkenyl, optionally substituted alkynyl, optionally substituted carbocyclyl, or optionally substituted aryl;
[0408] R^{Z1} is hydrogen, optionally substituted acyl, optionally substituted alkyl, optionally substituted alkenyl, optionally substituted alkynyl, optionally substituted carbocyclyl, or optionally substituted aryl;
[0409] R^{Z2} is hydrogen, optionally substituted acyl, optionally substituted alkyl, optionally substituted alkenyl, optionally substituted alkynyl, optionally substituted carbocyclyl, or optionally substituted aryl;
[0410] or optionally, R^{Z1} and R^{Z2} are taken together with their intervening atoms to form an optionally substituted carbocyclic ring;
[0411] R^{3A} is hydrogen, optionally substituted acyl, optionally substituted alkyl, optionally substituted alkenyl, or optionally substituted alkynyl;
[0412] R^{3B} is hydrogen, optionally substituted acyl, optionally substituted alkyl, optionally substituted alkenyl, or optionally substituted alkynyl; and/or
[0413] R^{Y} is hydrogen, optionally substituted acyl, optionally substituted alkyl, optionally substituted alkenyl, or optionally substituted alkynyl.

[0414] In some embodiments, a compound of Formula (X-A) is:

[chemical structure]

(Tetrahydrocannabinolic acid (THCA) (10a)).

[0415] In certain embodiments, a compound of Formula (10)

[chemical structure]

has a chiral atom labeled with * at carbon 10 and a chiral atom labeled with ** at carbon 6. In certain embodiments, in a compound of Formula (10)

[chemical structure]

the chiral atom labeled with * at carbon 10 is of the R-configuration or S-configuration; and a chiral atom labeled with ** at carbon 6 is of the R-configuration. In certain embodiments, in a compound of Formula (10)

[chemical structure]

the chiral atom labeled with * at carbon 10 is of the S-configuration; and a chiral atom labeled with ** at carbon 6 is of the R-configuration or S-configuration. In certain embodiments, in a compound of Formula (10)

[chemical structure]

the chiral atom labeled with * at carbon 10 is of the R-configuration and a chiral atom labeled with ** at carbon 6 is of the R-configuration. In certain embodiments, a compound of Formula (10)

[chemical structure]

is of the formula:

[chemical structure]

In certain embodiments, in a compound of Formula (10)

[chemical structure]

the chiral atom labeled with * at carbon 10 is of the S-configuration and a chiral atom labeled with ** at carbon 6 is of the S-configuration. In certain embodiments, a compound of Formula (10)

[chemical structure]

is of the formula:

[chemical structure]

[0416] In certain embodiments, a compound of Formula (10a)

[chemical structure]

has a chiral atom labeled with * at carbon 10 and a chiral atom labeled with ** at carbon 6. In certain embodiments, in a compound of Formula (10a)

[chemical structure]

the chiral atom labeled with * at carbon 10 is of the R-configuration or S-configuration; and a chiral atom labeled with ** at carbon 6 is of the R-configuration. In certain embodiments, in a compound of Formula (10a)

[chemical structure]

the chiral atom labeled with * at carbon 10 is of the S-configuration; and a chiral atom labeled with ** at carbon 6 is of the R-configuration or S-configuration. In certain embodiments, in a compound of Formula (10a)

[chemical structure]

the chiral atom labeled with * at carbon 10 is of the R-configuration and a chiral atom labeled with ** at carbon 6 is of the R-configuration. In certain embodiments, a compound of Formula (10a)

[chemical structure]

is of the formula:

[chemical structure]

In certain embodiments, in a compound of Formula (10a)

[chemical structure]

the chiral atom labeled with * at carbon 10 is of the S-configuration and a chiral atom labeled with ** at carbon 6 is of the S-configuration. In certain embodiments, a compound of Formula (10a)

[chemical structure]

is of the formula:

[chemical structure]

[0417] In some embodiments, a compound of Formula (X-A) is:

[chemical structure]

(cannabichromenic acid (CBCA) (11a)).

[0418] In some embodiments, a compound of Formula (X-A) is:

[chemical structure]

(cannabichromenic acid (CBCA) (11a)).

[0419] In some embodiments, a compound of Formula (X-B) is:

[chemical structure]

(cannabidiolic acid (CBDA) (9a)).

[0420] In certain embodiments, a compound of Formula (9)

[chemical structure]

has a chiral atom labeled with * at carbon 3 and a chiral atom labeled with ** at carbon 4. In certain embodiments, in a compound of Formula (9)

[chemical structure]

the chiral atom labeled with * at carbon 3 is of the R-configuration or S-configuration; and a chiral atom labeled with ** at carbon 4 is of the R-configuration. In certain embodiments, in a compound of Formula (9)

[chemical structure]

the chiral atom labeled with * at carbon 3 is of the S-configuration; and a chiral atom labeled with ** at carbon 4 is of the R-configuration or S-configuration. In certain embodiments, in a compound of Formula (9)

[chemical structure]

the chiral atom labeled with * at carbon 3 is of the R-configuration and a chiral atom labeled with ** at carbon 4 is of the R-configuration. In certain embodiments, a compound of Formula (9)

[chemical structure]

is of the formula:

[chemical structure]

In certain embodiments, in a compound of Formula (9)

[chemical structure]

the chiral atom labeled with * at carbon 3 is of the S-configuration and a chiral atom labeled with ** at carbon 4 is of the S-configuration. In certain embodiments, a compound of Formula (9)

[chemical structure]

is of the formula:

[chemical structure]

[0421] In certain embodiments, a compound of Formula (9a) (CBDA)

[chemical structure]

has a chiral atom labeled with * at carbon 3 and a chiral atom labeled with ** at carbon 4. In certain embodiments, in a compound of Formula (9a)

[chemical structure]

the chiral atom labeled with * at carbon 3 is of the R-configuration or S-configuration; and a chiral atom labeled with ** at carbon 4 is of the R-configuration. In certain embodiments, in a compound of Formula (9a)

[chemical structure]

the chiral atom labeled with * at carbon 3 is of the S-configuration; and a chiral atom labeled with ** at carbon 4 is of the R-configuration or S-configuration. In certain embodiments, in a compound of Formula (9a)

[chemical structure]

the chiral atom labeled with * at carbon 3 is of the R-configuration and a chiral atom labeled with ** at carbon 4 is of the R-configuration. In certain embodiments, a compound of Formula (9a)

[chemical structure]

is of the formula:

[chemical structure]

In certain embodiments, in a compound of Formula (9a)

[chemical structure]

the chiral atom labeled with * at carbon 3 is of the S-configuration and a chiral atom labeled with ** at carbon 4 is of the S-configuration. In certain embodiments, a compound of Formula (9a)

[chemical structure]

is of the formula:

[chemical structure]

[0422] In some embodiments, as shown in FIG. 2, a TS is capable of producing a cannabinoid from the product of a PT, including, without limitation, an enzyme capable of producing a compound of Formula (9), (10), or (11):

[chemical structure]

or a pharmaceutically acceptable salt, solvate, hydrate, polymorph, co-crystal, tautomer, stereoisomer, isotopically labeled derivative, or prodrug thereof, wherein R is hydrogen, optionally substituted acyl, optionally substituted alkyl, optionally substituted alkenyl, optionally substituted alkynyl, optionally substituted carbocyclyl, or optionally substituted aryl; produced from a compound of Formula (8′):

[chemical structure]

wherein a is 1, 2, 3, 4, 5, 6, 7, 8, 9, or 10; and R is hydrogen, optionally substituted acyl, optionally substituted alkyl, optionally substituted alkenyl, optionally substituted alkynyl, optionally substituted carbocyclyl, or optionally substituted aryl; or using any other substrate. In certain embodiments, a compound of Formula (8′) is a compound of Formula (8):

[chemical structure]

[0423] In certain embodiments, a compound of Formula (9), (10), or (11) is produced using a TS from a substrate compound of Formula (8′) (e.g., compound of Formula (8)), for example. Non-limiting examples of substrate compounds of Formula (8′) include but are not limited to cannabigerolic acid (CBGA), cannabigerovarinic acid (CBGVA), or cannabinerolic acid. In certain embodiments, at least one of the hydroxyl groups of the product compounds of Formula (9), (10), or (11) is further methylated. In certain embodiments, a compound of Formula (9) is methylated to form a compound of Formula (12):

[chemical structure]

or a pharmaceutically acceptable salt, solvate, hydrate, polymorph, co-crystal, tautomer, stereoisomer, isotopically labeled derivative, or prodrug thereof.

### Tetrahydrocannabinolic Acid Synthase (THCAS)

[0424] A host cell described in this application may comprise a TS that is a tetrahydrocannabinolic acid synthase (THCAS). As used in this application “tetrahydrocannabinolic acid synthase (THCAS)” or “Δ¹-tetrahydrocannabinolic acid (THCA) synthase” refers to an enzyme that is capable of catalyzing oxidative cyclization of a prenyl moiety (e.g., terpene) of a compound of Formula (8) to produce a ring-containing product (e.g., heterocyclic ring-containing product, carbocyclic-ring containing product) of Formula (10). In certain embodiments, a THCAS refers to an enzyme that is capable of producing Δ9-tetrahydrocannabinolic acid (Δ9-THCA, THCA, Δ9-Tetrahydro-cannabivarinic acid A (Δ9-THCVA-C3 A), THCVA, THCP, or a compound of Formula 10(a), from a compound of Formula (8). In certain embodiments, a THCAS is capable of producing Δ⁹-tetrahydrocannabinolic acid (Δ⁹-THCA, THCA, or a compound of Formula 10(a)). In certain embodiments, a THCAS is capable of producing Δ9-tetrahydrocannabivarinic acid (Δ9-THCVA, THCVA, or a compound of Formula 10 where R is n-propyl).

[0425] In some embodiments, a THCAS may catalyze the oxidative cyclization of substrates, such as 3-prenyl-2,4-dihydroxy-6-alkylbenzoic acids. In some embodiments, a THCAS may use cannabigerolic acid (CBGA) as a substrate. In some embodiments, the THCAS produces Δ9-THCA from CBGA. In some embodiments, a THCAS may catalyze the oxidative cyclization of cannabigerovarinic acid (CBGVA). In some embodiments, a THCAS exhibits specificity for CBGA substrates as compared to other substrates. In some embodiments, a THCAS may use a compound of Formula (8) of FIG. 2 where R is C4 alkyl (e.g., n-butyl) or R is C7 alkyl (e.g., n-heptyl) as a substrate. In some embodiments, a THCAS may use a compound of Formula (8) where R is C4 alkyl (e.g., n-butyl) as a substrate. In some embodiments, a THCAS may use a compound of Formula (8) of FIG. 2 where R is C7 alkyl (e.g., n-heptyl) as a substrate. In some embodiments, the THCAS exhibits specificity for substrates that can result in THCP as a product.

[0426] In some embodiments, a THCAS is from C. sativa. C, sativa THCAS performs the oxidative cyclization of the geranyl moiety of Cannabigerolic Acid (CBGA) (FIG. 4 Structure 8a) to form Tetrahydrocannabinolic Acid (FIG. 4 Structure 10a) using covalently bound flavin adenine dinucleotide (FAD) as a cofactor and molecular oxygen as the final electron acceptor. THCAS was first discovered and characterized by Taura et al. (JACS. 1995) following extraction of the enzyme from the leaf buds of C. sativa and confirmation of its THCA synthase activity in vitro upon the addition of CBGA as a substrate. Additional analysis indicated that the enzyme is a monomer and possesses FAD binding and Berberine Bridge Enzyme (BBE) sequence motifs. A crystal structure of the enzyme published by Shoyama et al. (J Mol Biol. 2012 Oct. 12, 423(1):96-105) revealed that the enzyme covalently binds to a molecule of the cofactor FAD. See also, e.g., Sirikantarams et al., J. Biol. Chem. 2004 Sep. 17; 279(38):39767-39774. There are several THCAS isozymes in Cannabis sativa.

[0427] In some embodiments, a C. sativa THCAS (Uniprot KB Accession No.: I1V0C5) comprises the amino acid sequence shown below, in which the signal peptide is underlined and bolded:

(SEQ ID NO: 641)
MNCSAFSFWFVCKIIFFFLSFNIQISIANPQENFLKCFSEYIPNNPANPKF
IYTQHDQLYMSVLNSTIQNLRFTSDTTPKPLVIVTPSNVSHIQASILCSKK
VGLQIRTRSGGHDAEGMSYISQVPFVVVDLRNMHSIKIDVHSQTAWVEAGA
TLGEVYYWINEKNENFSFPGGYCPTVGVGGHFSGGGYGALMRNYGLAADNI
IDAHLVNVDGKVLDRKSMGEDLFWAIRGGGGENFGIIAAWKIKLVAVPSKS
TIFSVKKNMEIHGLVKLFNKWQNIAYKYDKDLVLMTHFITKNITDNHGKNK
TTVHGYFSSIFHGGVDSLVDLMNKSFPELGIKKTDCKEFSWIDTTIFYSGV
VNFNTANFKKEILLDRSAGKKTAFSIKLDYVKKPIPETAMVKILEKLYEED
VGVGMYVLYPYGGIMEEISESAIPFPHRAGIMYELWYTASWEKQEDNEKHI
NWVRSVYNFTTPYVSQNPRLAYLNYRDLDLGKTNPESPNNYTQARIWGEKY
FGKNFNRLVKVKTKADPNNFFRNEQSIPPLPPHHH.

[0428] In some embodiments, a THCAS comprises the sequence shown below:

(SEQ ID NO: 642)
NPQENFLKCFSEYIPNNPANPKFIYTQHDQLYMSVLNSTIQNLRFTSDTTP
KPLVIVTPSNVSHIQASILCSKKVGLQIRTRSGGHDAEGMSYISQVPFVVV
DLRNMHSIKIDVHSQTAWVEAGATLGEVYYWINEKNENFSFPGGYCPTVGV
GGHFSGGGYGALMRNYGLAADNIIDAHLVNVDGKVLDRKSMGEDLFWAIRG
GGGENFGIIAAWKIKLVAVPSKSTIFSVKKNMEIHGLVKLFNKWQNIAYKY
DKDLVLMTHFITKNITDNHGKNKTTVHGYFSSIFHGGVDSLVDLMNKSFPE
LGIKKTDCKEFSWIDTTIFYSGVVNFNTANFKKEILLDRSAGKKTAFSIKL
DYVKKPIPETAMVKILEKLYEEDVGVGMYVLYPYGGIMEEISESAIPFPHR
AGIMYELWYTASWEKQEDNEKHINWVRSVYNFTTPYVSQNPRLAYLNYRDL
DLGKTNPESPNNYTQARIWGEKYFGKNFNRLVKVKTKADPNNFFRNEQSIP
PLPPHHH.

[0429] A non-limiting example of a nucleotide sequence encoding SEQ ID NO: 641 is:

(SEQ ID NO: 643)
aacccgcaagaaaactttctaaaatgcttttctgaatacattcctaacaac
cctgccaacccgaagtttatctacacacaacacgatcaattgtatatgagc
gtgttgaatagtacaatacagaacctgaggtttacatccgacacaacgccg
aaaccgctagtgatcgtcacaccctccaacgtaagccacattcaggcaagc
attttatgcagcaagaaagtcggactgcagataaggacgaggtccggagga
cacgacgccgaagggatgagctatatctcccaggtaccttttgtggtggta
gacttgagaaatatgcactctatcaagatagacgttcactcccaaaccgct
tgggttgaggcgggagccacccttggtgaggtctactactggatcaacgaa
aagaatgaaaattttagctttcctgggggatattgcccaactgtaggtgtt
ggcggccacttctcaggaggcggttatggggccttgatgcgtaactacgga
cttgcggccgacaacattatagacgcacatctagtgaatgtagacggcaaa
gttttagacaggaagagcatgggtgaggatcttttttgggcaattagaggc
ggagggggagaaaattttggaattatcgctgcttggaaaattaagctagtt
gcggtaccgagcaaaagcactatattctctgtaaaaaagaacatggagata
catggtttggtgaagctttttaataagtggcaaaacatcgcgtacaagtac
gacaaagatctggttctgatgacgcattttataacgaaaaatatcaccgac
aaccacggaaaaaacaaaaccacagtacatggctacttctctagtatattt
catgggggagtcgattctctggttgatttaatgaacaaatcattcccagag
ttgggtataaagaagacagactgtaaggagttctcttggattgacacaact
atattctattcaggcgtagtcaactttaacacggcgaatttcaaaaaagag
atccttctggacagatccgcaggtaagaaaactgcgttctctatcaaattg
gactatgtgaagaagcctattcccgaaaccgcgatggtcaagatacttgag
aaattatacgaggaagatgtgggagttggaatgtacgtactttatccctat
ggtgggataatggaagaaatcagcgagagcgccattccatttccccatcgt
gccggcatcatgtacgagctgtggtatactgcgagttgggagaagcaagaa
gacaacgaaaagcacattaactgggtcagatcagtttacaatttcaccacc
ccatacgtgtcccagaatccgcgtctggcttacttgaactaccgtgatctt
gacctgggtaaaacgaacccggagtcacccaacaattacactcaagctaga
atctggggagagaaatactttgggaagaacttcaacaggttagtaaaggtt
aaaaccaaggcagatccaaacaacttttttagaaatgaacaatccattccc
ccgctacccccgcaccatcac.

[0430] In some embodiments, a C. sativa THCAS comprises the amino acid sequence set forth in UniProtKB—Q8GTB6 (SEQ ID NO: 644):

MNCSAFSFWFVCKIIFFFLSFHIQISIANPRENFLKCFSKHIPNNVANPKL
VYTQHDQLYMSILNSTIQNLRFISDTTPKPLVIVTPSNNSHIQATILCSKK
VGLQIRTRSGGHDAEGMSYISQVPFVVVDLRNMHSIKIDVHSQTAWVEAGA
TLGEVYYWINEKNENLSFPGGYCPTVGVGGHFSGGGYGALMRNYGLAADNI
IDAHLVNVDGKVLDRKSMGEDLFWAIRGGGGENFGIIAAWKIKLVAVPSKS
TIFSVKKNMEIHGLVKLFNKWQNIAYKYDKDLVLMTHFITKNITDNHGKNK
TTVHGYFSSIFHGGVDSLVDLMNKSFPELGIKKTDCKEFSWIDTTIFYSGV
VNFNTANFKKEILLDRSAGKKTAFSIKLDYVKKPIPETAMVKILEKLYEED
VGAGMYVLYPYGGIMEEISESAIPFPHRAGIMYELWYTASWEKQEDNEKHI
NWVRSVYNFTTPYVSQNPRLAYLNYRDLDLGKTNHASPNNYTQARIWGEKY
FGKNFNRLVKVKTKVDPNNFFRNEQSIPPLPPHHH.

[0431] Additional non-limiting examples of THCAS enzymes may also be found in U.S. Pat. No. 9,512,391, U.S. Patent Application Publication No. 2018/0179564 and PCT Application No. PCT/US21/40941, which are incorporated by reference in this application in their entireties.

### Cannabidiolic Acid Synthase (CBDAS)

[0432] A host cell described in this application may comprise a TS that is a cannabidiolic acid synthase (CBDAS). As used in this application, a “CBDAS” refers to an enzyme that is capable of catalyzing oxidative cyclization of a prenyl moiety (e.g., terpene) of a compound of Formula (8) to produce a compound of Formula (9). In some embodiments, a compound of Formula 9 is a compound of Formula (9a) (cannabidiolic acid (CBDA)), CBDVA, or CBDP. A CBDAS may use cannabigerolic acid (CBGA) or cannabinerolic acid as a substrate. In some embodiments, a cannabidiolic acid synthase is capable of oxidative cyclization of cannabigerolic acid (CBGA) to produce cannabidiolic acid (CBDA). In some embodiments, the CBDAS may catalyze the oxidative cyclization of other substrates, such as 3-geranyl-2,4-dihydro-6-alkylbenzoic acids like cannabigerovarinic acid (CBGVA) or a substrate of Formula (8) with R as a C7 alkyl (heptyl) group (cannabigerophorolic acid (CBGPA)). In some embodiments, the CBDAS exhibits specificity for CBGA substrates.

[0433] In some embodiments, a CBDAS is from Cannabis. In C. sativa, CBDAS is encoded by the CBDAS gene and is a flavoenzyme. A non-limiting example of a CBDAS is provided by UniProtKB—A6P6V9 (SEQ ID NO: 645) from C. sativa:

MKCSTFSFWFVCKIIFFFFSFNIQTSIANPRENFLKCFSQYIPNNATNLKL
VYTONNPLYMSVLNSTIHNLRFTSDTTPKPLVIVTPSHVSHIQGTILCSKK
VGLQIRTRSGGHDSEGMSYISQVPFVIVDLRNMRSIKIDVHSQTAWVEAGA
TLGEVYYWVNEKNENLSLAAGYCPTVCAGGHFGGGGYGPLMRNYGLAADNI
IDAHLVNVHGKVLDRKSMGEDLFWALRGGGAESFGIIVAWKIRLVAVPKST
MFSVKKIMEIHELVKLVNKWQNIAYKYDKDLLLMTHFITRNITDNQGKNKT
AIHTYFSSVFLGGVDSLVDLMNKSFPELGIKKTDCRQLSWIDTHIFYSGVV
NYDTDNFNKEILLDRSAGONGAFKIKLDYVKKPIPESVFVQILEKLYEEDI
GAGMYALYPYGGIMDEISESAIPFPHRAGILYELWYICSWEKQEDNEKHLN
WIRNIYNFMTPYVSKNPRLAYLNYRDLDIGINDPKNPNNYTQARIWGEKYF
GKNFDRLVKVKTLVDPNNFFRNEQSIPPLPRHRH.

[0434] Additional non-limiting examples of CBDAS enzymes may also be found in U.S. Pat. No. 9,512,391, U.S. Patent Application Publication No. 2018/0179564 and PCT Application No. PCT/US21/40941 w % which are incorporated by reference in this application in their entireties.

### Cannabichromenic Acid Synthase (CBCAS)

[0435] A host cell described in this application may comprise a TS that is a cannabichromenic acid synthase (CBCAS). As used in this application, a “CBCAS” refers to an enzyme that is capable of catalyzing oxidative cyclization of a prenyl moiety (e.g., terpene) of a compound of Formula (8) to produce a compound of Formula (11). In some embodiments, a compound of Formula (11) is a compound of Formula (11a) (cannabichromenic acid (CBCA)), CBCVA, or a compound of Formula (8) with R as a C7 alkyl (heptyl) group. A CBCAS may use cannabigerolic acid (CBGA) as a substrate. In some embodiments, a CBCAS produces cannabichromenic acid (CBCA) from cannabigerolic acid (CBGA). In some embodiments, the CBCAS may catalyze the oxidative cyclization of other substrates, such as 3-geranyl-2,4-dihydro-6-alkylbenzoic acids like cannabigerovarinic acid (CBGVA), or a substrate of Formula (8) with R as a C7 alkyl (heptyl) group. In some embodiments, the CBCAS exhibits specificity for CBGA substrates.

[0436] In some embodiments, a CBCAS is from Cannabis. In C. sativa, an amino acid sequence encoding CBCAS is provided by, and incorporated by reference from, SEQ ID NO:2 disclosed in U.S. Patent Publication No. 2017/0211049. In other embodiments, a CBCAS may be a THCAS described in and incorporated by reference from U.S. Pat. No. 9,359,625. SEQ ID NO:2 disclosed in U.S. Patent Application Publication No. 2017/0211049 (corresponding to SEQ ID NO: 646 in this application) has the amino acid sequence:

MNCSTFSFWFVCKIIFFFLSFNIQISIANPQENFLKCFSEYIPNNPANPKF
IYTQHDQLYMSVLNSTIQNLRFTSDTTPKPLVIVTPSNVSHIQASILCSKK
VGLQIRTRSGGHDAEGLSYISQVPFAIVDLRNMHTVKVDIHSQTAWVEAGA
TLGEVYYWINEMNENFSFPGGYCPTVGVGGHFSGGGYGALMRNYGLAADNI
IDAHLVNVDGKVLDRKSMGEDLFWAIRGGGGENFGIIAACKIKLVVVPSKA
TIFSVKKNMEIHGLVKLENKWQNIAYKYDKDLMLTTHFRTRNITDNHGKNK
TTVHGYFSSIFLGGVDSLVDLMNKSFPELGIKKTDCKELSWIDTTIFYSGV
VNYNTANFKKEILLDRSAGKKTAFSIKLDYVKKLIPETAMVKILEKLYEEE
VGVGMYVLYPYGGIMDEISESAIPFPHRAGIMYELWYTATWEKQEDNEKHI
NWVRSVYNFTTPYVSQNPRLAYLNYRDLDLGKTNPESPNNYTQARIWGEKY
FGKNFNRLVKVKTKADPNNFFRNEQSIPPLPPRHH.

[0437] Additional non-limiting examples of CBCAS enzymes may also be found in PCT Publication No. WO/2021/195520 and PCT Application No. PCT/US21/40941, which are incorporated by reference in this application in their entireties.

### Variants

[0438] Aspects of the disclosure relate to nucleic acids encoding any of the polypeptides (e.g., AAE, PKS, PKC, PT, or TS) described in this application. In some embodiments, a nucleic acid encompassed by the disclosure is a nucleic acid that hybridizes under high or medium stringency conditions to a nucleic acid encoding an AAE, PKS, PKC. PT, or TS and is biologically active. For example, high stringency conditions of 0.2 to 1×SSC at 65° C. followed by a wash at 0.2×SSC at 65° C. can be used. In some embodiments, a nucleic acid encompassed by the disclosure is a nucleic acid that hybridizes under low stringency conditions to a nucleic acid encoding an AAE, PKS, PKC, PT, or TS and is biologically active. For example, low stringency conditions of 6×SSC at room temperature followed by a wash at 2×SSC at room temperature can be used. Other hybridization conditions include 3×SSC at 40 or 50° C., followed by a wash in 1 or 2×SSC at 20, 30, 40, 50, 60, or 65° C.

[0439] Hybridizations can be conducted in the presence of formaldehyde, e.g., 10%, 20%, 30% 40% or 50%, which further increases the stringency of hybridization. Theory and practice of nucleic acid hybridization is described, e.g., in S. Agrawal (ed.) Methods in Molecular Biology, volume 20; and Tijssen (1993) Laboratory Techniques in biochemistry and molecular biology-hybridization with nucleic acid probes, e.g., part 1 chapter 2 “Overview of principles of hybridization and the strategy of nucleic acid probe assays,” Elsevier, New York provide a basic guide to nucleic acid hybridization.

[0440] Variants of enzyme sequences described in this application (e.g., AAE, PKS. PKC, PT, or TS, including nucleic acid or amino acid sequences) are also encompassed by the present disclosure. A variant may share at least 5%, at least 10%, at least 15%, at least 20%, at least 25%, at least 30%, at least 35%, at least 40%, at least 45%, at least 50%, at least 55%, at least 60%, at least 65%, at least 70%, at least 71%, at least 72%, at least 73%, at least 74%, at least 75%, at least 76%, at least 77%, at least 78%, at least 79%, at least 80%, at least 81%, at least 82%, at least 83%, at least 84%, at least 85%, at least 86%, at least 87%, at least 88%, at least 89%, at least 90%, at least 91%, at least 92%, at least 93%, at least 94%, at least 95%, at least 96%, at least 97%, at least 98%, at least 99%, or 100% sequence identity with a reference sequence, including all values in between.

[0441] Unless otherwise noted, the term “sequence identity,” which is used interchangeably in this disclosure with the term “percent identity,” as known in the art, refers to a relationship between the sequences of two polypeptides or polynucleotides, as determined by sequence comparison (alignment). In some embodiments, sequence identity is determined across the entire length of a sequence (e.g., AAE, PKS, PKC, PT, or TS sequence). In some embodiments, sequence identity is determined over a region (e.g., a stretch of amino acids or nucleic acids, e.g., the sequence spanning an active site) of a sequence (e.g., AAE, PKS, PKC, PT, or TS sequence). For example, in some embodiments, sequence identity is determined over a region corresponding to at least 30%, at least 40%, at least 50%, at least 60%, at least 70%, at least 80%, at least 90%, at least 95%, or over 100% of the length of the reference sequence.

[0442] Identity measures the percent of identical matches between the smaller of two or more sequences with gap alignments (if any) addressed by a particular mathematical model, algorithm, or computer program.

[0443] Identity of related polypeptides or nucleic acid sequences can be readily calculated by any of the methods known to one of ordinary skill in the art. The percent identity of two sequences (e.g., nucleic acid or amino acid sequences) may, for example, be determined using the algorithm of Karlin and Altschul Proc. Natl. Acad. Sci. USA 87:2264-68, 1990, modified as in Karlin and Altschul Proc. Natl. Acad. Sci. USA 90:5873-77, 1993. Such an algorithm is incorporated into the NBLAST® and XBLAST® programs (version 2.0) of Altschul et al., J. Mol. Biol. 215:403-10, 1990. BLAST® protein searches can be performed, for example, with the XBLAST program, score=50, wordlength=3 to obtain amino acid sequences homologous to the proteins described in this application. Where gaps exist between two sequences, Gapped BLAST can be utilized, for example, as described in Altschul et al., Nucleic Acids Res. 25(17):3389-3402, 1997. When utilizing BLAST® and Gapped BLAST® programs, the default parameters of the respective programs (e.g., XBLAST® and NBLAST®) can be used, or the parameters can be adjusted appropriately as would be understood by one of ordinary skill in the art.

[0444] Another local alignment technique which may be used, for example, is based on the Smith-Waterman algorithm (Smith, T. F. & Waterman, M. S. (1981) “Identification of common molecular subsequences.” J. Mol. Biol. 147:195-197). A general global alignment technique which may be used, for example, is the Needleman-Wunsch algorithm (Needleman, S. B. & Wunsch, C. D. (1970) “A general method applicable to the search for similarities in the amino acid sequences of two proteins.” J. Mol. Biol. 48:443-453), which is based on dynamic programming.

[0445] More recently, a Fast Optimal Global Sequence Alignment Algorithm (FOGSAA) was developed that purportedly produces global alignment of nucleic acid and amino acid sequences faster than other optimal global alignment methods, including the Needleman-Wunsch algorithm. In some embodiments, the identity of two polypeptides is determined by aligning the two amino acid sequences, calculating the number of identical amino acids, and dividing by the length of one of the amino acid sequences. In some embodiments, the identity of two nucleic acids is determined by aligning the two nucleotide sequences and calculating the number of identical nucleotide and dividing by the length of one of the nucleic acids.

[0446] For multiple sequence alignments, computer programs including Clustal Omega (Sievers et al., Mol Syst Biol. 2011 Oct. 11; 7:539) may be used.

[0447] In preferred embodiments, a sequence, including a nucleic acid or amino acid sequence, is found to have a specified percent identity to a reference sequence, such as a sequence disclosed in this application and/or recited in the claims when sequence identity is determined using the algorithm of Karlin and Altschul Proc. Natl. Acad. Sci. USA 87:2264-68, 1990, modified as in Karlin and Altschul Proc. Natl. Acad. Sci. USA 90:5873-77, 1993 (e.g., BLAST®, NBLAST®, XBLAST® or Gapped BLAST programs, using default parameters of the respective programs).

[0448] In some embodiments, a sequence, including a nucleic acid or amino acid sequence, is found to have a specified percent identity to a reference sequence, such as a sequence disclosed in this application and/or recited in the claims when sequence identity is determined using the Smith-Waterman algorithm (Smith, T. F. & Waterman, M. S. (1981) “Identification of common molecular subsequences.” J. Mol. Biol. 147:195-197) or the Needleman-Wunsch algorithm (Needleman, S. B. & Wunsch, C. D. (1970) “A general method applicable to the search for similarities in the amino acid sequences of two proteins.” J. Mol. Biol. 48:443453) using default parameters.

[0449] In some embodiments, a sequence, including a nucleic acid or amino acid sequence, is found to have a specified percent identity to a reference sequence, such as a sequence disclosed in this application and/or recited in the claims when sequence identity is determined using a Fast Optimal Global Sequence Alignment Algorithm (FOGSAA) using default parameters.

[0450] In some embodiments, a sequence, including a nucleic acid or amino acid sequence, is found to have a specified percent identity to a reference sequence, such as a sequence disclosed in this application and/or recited in the claims when sequence identity is determined using Clustal Omega (Sievers et al., Mol Syst Biol. 2011 Oct. 11; 7:539) using default parameters.

[0451] As used in this application, a residue (such as a nucleic acid residue or an amino acid residue) in sequence “X” is referred to as corresponding to a position or residue (such as a nucleic acid residue or an amino acid residue) “Z” in a different sequence “Y” when the residue in sequence “X” is at the counterpart position of “Z” in sequence “Y” when sequences X and Y are aligned using amino acid sequence alignment tools known in the art.

[0452] As used in this application, variant sequences may be homologous sequences. As used in this application, homologous sequences are sequences (e.g., nucleic acid or amino acid sequences) that share a certain percent identity (e.g., at least 5%, at least 10%, at least 15%, at least 20%, at least 25%, at least 30%, at least 35%, at least 40%, at least 45%, at least 50%, at least 55%, at least 60%, at least 65%, at least 70%, at least 71%, at least 72%, at least 73%, at least 74%, at least 75%, at least 76%, at least 77%, at least 78%, at least 79%, at least 80%, at least 81%, at least 82%, at least 83%, at least 84%, at least 85%, at least 86%, at least 87%, at least 88%, at least 89%, at least 90%, at least 91%, at least 92%, at least 93%, at least 94%, at least 95%, at least 96%, at least 97%, at least 98%, at least 99%, or 100% percent identity, including all values in between). Homologous sequences include but are not limited to paralogous or orthologous sequences. Paralogous sequences arise from duplication of a gene within a genome of a species, while orthologous sequences diverge after a speciation event.

[0453] In some embodiments, a polypeptide variant (e.g., AAE, PKS, PKC, PT, or TS enzyme variant) comprises a domain that shares a secondary structure (e.g., alpha helix, beta sheet) with a reference polypeptide (e.g., a reference AAE, PKS, PKC, PT, or TS enzyme). In some embodiments, a polypeptide variant (e.g., AAE, PKS, PKC, PT, or TS enzyme variant) shares a tertiary structure with a reference polypeptide (e.g., a reference AAE, PKS, PKC, PT, or TS enzyme). As a non-limiting example, a polypeptide variant (e.g., AAE, PKS. PKC, PT, or TS enzyme) may have low primary sequence identity (e.g., less than 80%, less than 75%, less than 70%, less than 65%, less than 60%, less than 55%, less than 50%, less than 45%, less than 40%, less than 35%, less than 30%, less than 25%, less than 20%, less than 15%, less than 10%, or less than 5% sequence identity) compared to a reference polypeptide, but share one or more secondary structures (e.g., including but not limited to loops, alpha helices, or beta sheets), or have the same tertiary structure as a reference polypeptide. For example, a loop may be located between a beta sheet and an alpha helix, between two alpha helices, or between two beta sheets. Homology modeling may be used to compare two or more tertiary structures.

[0454] Functional variants of the recombinant AAE, PKS, PKC, PT, or TS enzyme disclosed in this application are encompassed by the present disclosure. For example, functional variants may bind one or more of the same substrates or produce one or more of the same products. Functional variants may be identified using any method known in the art. For example, the algorithm of Karlin and Altschul Proc. Natl. Acad. Sci. USA 87:2264-68, 1990 described above may be used to identify homologous proteins with known functions.

[0455] Putative functional variants may also be identified by searching for polypeptides with functionally annotated domains. Databases including Pfam (Sonnhammer et al., Proteins. 1997 July; 28(3):405-20) may be used to identify polypeptides with a particular domain.

[0456] Homology modeling may also be used to identify amino acid residues that are amenable to mutation (e.g., substitution, deletion, and/or insertion) without affecting function. A non-limiting example of such a method may include use of position-specific scoring matrix (PSSM) and an energy minimization protocol.

[0457] Position-specific scoring matrix (PSSM) uses a position weight matrix to identify, consensus sequences (e.g., motifs). PSSM can be conducted on nucleic acid or amino acid sequences. Sequences are aligned and the method takes into account the observed frequency of a particular residue (e.g., an amino acid or a nucleotide) at a particular position and the number of sequences analyzed. See, e.g., Stormo et al., Nucleic Acids Res. 1982 May 11:10(9):2997-3011. The likelihood of observing a particular residue at a given position can be calculated. Without being bound by a particular theory, positions in sequences with high variability may be amenable to mutation (e.g., substitution, deletion, and/or insertion; e.g., PSSM score≥0) to produce functional homologs.

[0458] PSSM may be paired with calculation of a Rosetta energy function, which determines the difference between the wild-type and the single-point mutant. The Rosetta energy function calculates this difference as (ΔΔG_{calc}). With the Rosetta function, the bonding interactions between a mutated residue and the surrounding atoms are used to determine whether an amino acid substitution, deletion, or insertion increases or decreases protein stability. For example, an amino acid substitution, deletion, or insertion that is designated as favorable by the PSSM score (e.g. PSSM score≥0), can then be analyzed using the Rosetta energy function to determine the potential impact of the mutation on protein stability. Without being bound by a particular theory, potentially stabilizing mutations are desirable for protein engineering (e.g., production of functional homologs). In some embodiments, a potentially stabilizing mutation has a ΔΔG_{calc} value of less than −0.1 (e.g., less than −0.2, less than −0.3, less than −0.35, less than −0.4, less than −0.45, less than −0.5, less than −0.55, less than −0.6, less than −0.65, less than −0.7, less than −0.75, less than −0.8, less than −0.85, less than −0.9, less than −0.95, or less than −1.0) Rosetta energy units (R.e.u.). See, e.g., Goldenzweig et al., Mol Cell. 2016 Jul. 21; 63(2):337-346. Doi: 10.1016/j.molcel.2016.06.012.

[0459] In some embodiments, an AAE, PKS, PKC, PT, or TS coding sequence comprises a mutation at 1, 2, 3, 4, 5, 6, 7, 8, 9, 10, 11, 12, 13, 14, 15, 16, 17, 18, 19, 20, 21, 22, 23, 24, 25, 26, 27, 28, 29, 30, 31, 32, 33, 34, 35, 36, 37, 38, 39, 40, 41, 42, 43, 44, 45, 46, 47, 48, 49, 50, 51, 52, 53, 54, 55, 56, 57, 58, 59, 60, 61, 62, 63, 64, 65, 66, 67, 68, 69, 70, 71, 72, 73, 74, 75, 76, 77, 78, 79, 80, 81, 82, 83, 84, 85, 86, 87, 88, 89, 90, 91, 92, 93, 94, 95, 96, 97, 98, 99, 100 or more than 100 positions relative to a reference (e.g., AAE, PKS, PKC, PT, or TS) coding sequence. In some embodiments, the AAE, PKS, PKC, PT, or TS coding sequence comprises a mutation in 1, 2, 3, 4, 5, 6, 7, 8, 9, 10, 11, 12, 13, 14, 15, 16, 17, 18, 19, 20, 21, 22, 23, 24, 25, 26, 27, 28, 29, 30, 31, 32, 33, 34, 35, 36, 37, 38, 39, 40, 41, 42, 43, 44, 45, 46, 47, 48, 49, 50, 51, 52, 53, 54, 55, 56, 57, 58, 59, 60, 61, 62, 63, 64, 65, 66, 67, 68, 69, 70, 71, 72, 73, 74, 75, 76, 77, 78, 79, 80, 81, 82, 83, 84, 85, 86, 87, 88, 89, 90, 91, 92, 93, 94, 95, 96, 97, 98, 99, 100 or more codons of the coding sequence relative to a reference (e.g., AAE, PKS, PKC, PT, or TS) coding sequence. As will be understood by one of ordinary skill in the art, a mutation within a codon may or may not change the amino acid that is encoded by the codon due to degeneracy of the genetic code. In some embodiments, the one or more mutations in the coding sequence do not alter the amino acid sequence of the coding sequence (e.g., AAE. PKS, PKC, PT, or TS) relative to the amino acid sequence of a reference polypeptide (e.g., AAE, PKS, PKC, PT, or TS).

[0460] In some embodiments, the one or more mutations in a recombinant coding sequence (e.g., AAE, PKS, PKC, PT, or TS coding sequence) do alter the amino acid sequence of the corresponding polypeptide (e.g., AAE, PKS, PKC, PT, or TS) relative to the amino acid sequence of a reference polypeptide (e.g., AAE, PKS, PKC, PT, or TS). In some embodiments, the one or more mutations alters the amino acid sequence of the polypeptide (e.g., AAE, PKS, PKC, PT, or TS) relative to the amino acid sequence of a reference polypeptide (e.g., AAE. PKS, PKC, PT, or TS) and alters (enhances or reduces) an activity of the polypeptide relative to the reference polypeptide.

[0461] The activity (e.g., specific activity) of any of the recombinant polypeptides described in this application (e.g., AAE, PKS, PKC, PT, or TS) may be measured using routine methods. As a non-limiting example, a recombinant polypeptide's activity may be determined by measuring its substrate specificity, product(s) produced, the concentration of product(s) produced, or any combination thereof. As used in this application, “specific activity” of a recombinant polypeptide refers to the amount (e.g., concentration) of a particular product produced for a given amount (e.g., concentration) of the recombinant polypeptide per unit time.

[0462] The skilled artisan will also realize that mutations in a recombinant polypeptide (e.g., AAE, PKS, PKC, PT, or TS) coding sequence may result in conservative amino acid substitutions to provide functionally equivalent variants of the foregoing polypeptides, e.g., variants that retain the activities of the polypeptides. As used in this application, a “conservative amino acid substitution” refers to an amino acid substitution that does not alter the relative charge or size characteristics or functional activity of the protein in which the amino acid substitution is made.

[0463] In some instances, an amino acid is characterized by its R group (see, e.g., Table 4). For example, an amino acid may comprise a nonpolar aliphatic R group, a positively charged R group, a negatively charged R group, a nonpolar aromatic R group, or a polar uncharged R group. Non-limiting examples of an amino acid comprising a nonpolar aliphatic R group include alanine, glycine, valine, leucine, methionine, and isoleucine. Non-limiting examples of an amino acid comprising a positively charged R group includes lysine, arginine, and histidine. Non-limiting examples of an amino acid comprising a negatively charged R group include aspartate and glutamate. Non-limiting examples of an amino acid comprising a nonpolar, aromatic R group include phenylalanine, tyrosine, and tryptophan. Non-limiting examples of an amino acid comprising a polar uncharged R group include serine, threonine, cysteine, proline, asparagine, and glutamine.

[0464] Non-limiting examples of functionally equivalent variants of polypeptides may include conservative amino acid substitutions in the amino acid sequences of proteins disclosed in this application. As used in this application “conservative substitution” is used interchangeably with “conservative amino acid substitution” and refers to any one of the amino acid substitutions provided in Table 4.

[0465] In some embodiments, 1, 2, 3, 4, 5, 6, 7, 8, 9, 10, 11, 12, 13, 14, 15, 16, 17, 18, 19, 20 or more than 20 residues can be changed when preparing variant polypeptides. In some embodiments, amino acids are replaced by conservative amino acid substitutions. In some embodiments, amino acids are replaced by non-conservative amino acid substitutions.

TABLE 4
Conservative Amino Acid Substitutions

| Original | | Conservative Amino |
|---|---|---|
| Residue | R Group Type | Acid Substitutions |
| Ala | nonpolar aliphatic R group | Cys, Gly, Ser |
| Arg | positively charged R group | His, Lys |
| Asn | polar uncharged R group | Asp, Gln, Glu |
| Asp | negatively charged R group | Asn, Gln, Glu |
| Cys | polar uncharged R group | Ala, Ser |
| Gln | polar uncharged R group | Asn, Asp, Glu |
| Glu | negatively charged R group | Asn, Asp, Gln |
| Gly | nonpolar aliphatic R group | Ala, Ser |
| His | positively charged R group | Arg, Tyr, Trp |
| Ile | nonpolar aliphatic R group | Leu, Met, Val |
| Leu | nonpolar aliphatic R group | Ile, Met, Val |
| Lys | positively charged R group | Arg, His |
| Met | nonpolar aliphatic R group | Ile, Leu, Phe, Val |
| Pro | polar uncharged R group | |
| Phe | nonpolar aromatic R group | Met, Trp, Tyr |
| Ser | polar uncharged R group | Ala, Gly, Thr |
| Thr | polar uncharged R group | Ala, Asn, Ser |
| Trp | nonpolar aromatic R group | His, Phe, Tyr, Met |
| Tyr | nonpolar aromatic R group | His, Phe, Trp |
| Val | nonpolar aliphatic R group | Ile, Leu, Met, Thr |

[0466] Amino acid substitutions in the amino acid sequence of a polypeptide to produce a recombinant polypeptide (e.g., AAE, PKS, PKC, PT, or TS) variant having a desired property and/or activity can be made by alteration of the coding sequence of the polypeptide (e.g., AAE. PKS, PKC, PT, or TS). Similarly, conservative amino acid substitutions in the amino acid sequence of a polypeptide to produce functionally equivalent variants of the polypeptide typically are made by alteration of the coding sequence of the recombinant polypeptide (e.g., AAE, PKS, PKC. PT, or TS).

[0467] Mutations (e.g., substitutions, insertions, additions, or deletions) can be made in a nucleic acid sequence by a variety of methods known to one of ordinary skill in the art. For example, mutations (e.g., substitutions, insertions, additions, or deletions) can be made by PCR-directed mutation, site-directed mutagenesis according to the method of Kunkel (Kunkel, Proc. Nat. Acad. Sci. U.S.A. 82: 488-492, 1985), by chemical synthesis of a gene encoding a polypeptide, by CRISPR, or by insertions, such as insertion of a tag (e.g., a HIS tag or a GFP tag). Mutations can include, for example, substitutions, insertions, additions, deletions, and translocations, generated by any method known in the art. Methods for producing mutations may be found in in references such as Molecular Cloning: A Laboratory Manual, J. Sambrook, et al., eds., Fourth Edition, Cold Spring Harbor Laboratory Press, Cold Spring Harbor, New York, 2012, or Current Protocols in Molecular Biology, F. M. Ausubel, et al., eds., John Wiley & Sons, Inc., New York, 2010.

[0468] In some embodiments, methods for producing variants include circular permutation (Yu and Lutz, Trends Biotechnol. 2011 January; 29(1):18-25). In circular permutation, the linear primary sequence of a polypeptide can be circularized (e.g., by joining the N-terminal and C-terminal ends of the sequence) and the polypeptide can be severed (“broken”) at a different location. Thus, the linear primary sequence of the new polypeptide may have low sequence identity (e.g., less than 80%, less than 75%, less than 70%, less than 65%, less than 60%, less than 55%, less than 50%, less than 45%, less than 40%, less than 35%, less than 30%, less than 25%, less than 20%, less than 15%, less than 10%, less or less than 5%, including all values in between) as determined by linear sequence alignment methods (e.g., Clustal Omega or BLAST). Topological analysis of the two proteins, however, may reveal that the tertiary structure of the two polypeptides is similar or dissimilar. Without being bound by a particular theory, a variant polypeptide created through circular permutation of a reference polypeptide and with a similar tertiary structure as the reference polypeptide can share similar functional characteristics (e.g., enzymatic activity, enzyme kinetics, substrate specificity or product specificity). In some instances, circular permutation may alter the secondary structure, tertiary structure or quaternary structure and produce an enzyme with different functional characteristics (e.g., increased or decreased enzymatic activity, different substrate specificity, or different product specificity). See, e.g., Yu and Lutz, Trends Biotechnol. 2011 January; 29(1):18-25.

[0469] It should be appreciated that in a protein that has undergone circular permutation, the linear amino acid sequence of the protein would differ from a reference protein that has not undergone circular permutation. However, one of ordinary skill in the art would be able to determine which residues in the protein that has undergone circular permutation correspond to residues in the reference protein that has not undergone circular permutation by, for example, aligning the sequences and detecting conserved motifs, and/or by comparing the structures or predicted structures of the proteins, e.g., by homology modeling.

[0470] In some embodiments, an algorithm that determines the percent identity between a sequence of interest and a reference sequence described in this application accounts for the presence of circular permutation between the sequences. The presence of circular permutation may be detected using any method known in the art, including, for example, RASPODOM (Weiner et al., Bioinformatics. 2005 Apr. 1; 21(7):932-7). In some embodiments, the presence of circulation permutation is corrected for (e.g., the domains in at least one sequence are rearranged) prior to calculation of the percent identity between a sequence of interest and a sequence described in this application. The claims of this application should be understood to encompass sequences for which percent identity to a reference sequence is calculated after taking into account potential circular permutation of the sequence.

### Expression of Nucleic Acids in Host Cells

[0471] Aspects of the present disclosure relate to recombinant enzymes, functional modifications and variants thereof, as well as their uses. For example, the methods described in this application may be used to produce cannabinoids and/or cannabinoid precursors. The methods may comprise using a host cell comprising an enzyme disclosed in this application, cell lysate, isolated enzymes, or any combination thereof. Methods comprising recombinant expression of genes encoding an enzyme disclosed in this application in a host cell are encompassed by the present disclosure. In vitro methods comprising reacting one or more cannabinoid precursors or cannabinoids in a reaction mixture with an enzyme disclosed in this application are also encompassed by the present disclosure. In some embodiments, the enzyme is a PT.

[0472] A nucleic acid encoding any of the recombinant polypeptides (e.g., AAE, PKS, PKC, PT, or TS enzyme) described in this application may be incorporated into any appropriate vector through any method known in the art. For example, the vector may be an expression vector, including but not limited to a viral vector (e.g., a lentiviral, retroviral, adenoviral, or adeno-associated viral vector), any vector suitable for transient expression, any vector suitable for constitutive expression, or any vector suitable for inducible expression (e.g., a galactose-inducible or doxycycline-inducible vector).

[0473] A vector encoding any of the recombinant polypeptides (e.g., AAE, PKS, PKC, PT, or TS enzyme) described in this application may be introduced into a suitable host cell using any method known in the art. Non-limiting examples of yeast transformation protocols are described in Gietz el al., Yeast transformation can be conducted by the LiAc/SS Carrier DNA/PEG method. Methods Mol Biol. 2006; 313:107-20, which is hereby incorporated by reference in its entirety. Host cells may be cultured under any conditions suitable as would be understood by one of ordinary skill in the art. For example, any media, temperature, and incubation conditions known in the art may be used. For host cells carrying an inducible vector, cells may be cultured with an appropriate inducible agent to promote expression.

[0474] In some embodiments, a vector replicates autonomously in the cell. In some embodiments, a vector integrates into a chromosome within a cell. A vector can contain one or more endonuclease restriction sites that are cut by a restriction endonuclease to insert and ligate a nucleic acid containing a gene described in this application to produce a recombinant vector that is able to replicate in a cell. Vectors are typically composed of DNA, although RNA vectors are also available. Cloning vectors include, but are not limited to: plasmids, fosmids, phagemids, virus genomes and artificial chromosomes. As used in this application, the terms “expression vector” or “expression construct” refer to a nucleic acid construct, generated recombinantly or synthetically, with a series of specified nucleic acid elements that permit transcription of a particular nucleic acid in a host cell (e.g., microbe), such as a yeast cell. In some embodiments, the nucleic acid sequence of a gene described in this application is inserted into a cloning vector so that it is operably joined to regulatory sequences and, in some embodiments, expressed as an RNA transcript. In some embodiments, the vector contains one or more markers, such as a selectable marker as described in this application, to identify cells transformed or transfected with the recombinant vector. In some embodiments, a host cell has already been transformed with one or more vectors. In some embodiments, a host cell that has been transformed with one or more vectors is subsequently transformed with one or more vectors. In some embodiments, a host cell is transformed simultaneously with more than one vector. In some embodiments, a cell that has been transformed with a vector or an expression cassette incorporates all or part of the vector or expression cassette into its genome. In some embodiments, the nucleic acid sequence of a gene described in this application is recoded. Recoding may increase production of the gene product by at least 10%, at least 15%, at least 20%, at least 25%, at least 30%, at least 35%, at least 40%, at least 45%, at least 50%, at least 55%, at least 60%, at least 65%, at least 70%, at least 75%, at least 80%, at least 85%, at least 90%, at least 95%, or 100%, including all values in between) relative to a reference sequence that is not recoded.

[0475] In some embodiments, the nucleic acid encoding any of the proteins described in this application is under the control of regulatory sequences (e.g., enhancer sequences). In some embodiments, a nucleic acid is expressed under the control of a promoter. The promoter can be a native promoter, e.g., the promoter of the gene in its endogenous context, which provides normal regulation of expression of the gene. Alternatively, a promoter can be a promoter that is different from the native promoter of the gene, e.g., the promoter is different from the promoter of the gene in its endogenous context.

[0476] In some embodiments, the promoter is a eukaryotic promoter. Non-limiting examples of eukaryotic promoters include TDH3, PGK1, PKC1, PDC1, TEF1, TEF2, RPL18B, SSA1, TDH2, PYK1, TPI1, GAL1, GAL10, GAL7, GAL3, GAL2, MET3, MET25, HXT3, HXT7, ACT1, ADH1, ADH2, CUPI-1, ENO2, and SOD1, as would be known to one of ordinary skill in the art (see, e.g., Addgene website: blog.addgene.org/plasmids-101-the-promoter-region). In some embodiments, the promoter is a prokaryotic promoter (e.g., bacteriophage or bacterial promoter). Non-limiting examples of bacteriophage promoters include Pls1con, T3, T7, SP6, and PL. Non-limiting examples of bacterial promoters include Pbad, PmgrB, Ptrc2, Plac/ara, Ptac, and Pm.

[0477] In some embodiments, the promoter is an inducible promoter. As used in this application, an “inducible promoter” is a promoter controlled by the presence or absence of a molecule. This may be used, for example, to controllably induce the expression of an enzyme. In some embodiments, an inducible promoter linked to an enzyme may be used to regulate expression of the enzyme(s), for example to reduce cannabinoid production in certain scenarios (e.g., during transport of the genetically modified organism to satisfy regulatory restrictions in certain jurisdictions, or between jurisdictions, where cannabinoids may not be shipped). In some embodiments, an inducible promoter linked to an enzyme may be used to regulate expression of the enzyme(s), for example to reduce cannabinoid production in certain scenarios (e.g., during transport of the genetically modified organism to satisfy regulatory restrictions in certain jurisdictions, or between jurisdictions, where cannabinoids may not be shipped). Non-limiting examples of inducible promoters include chemically regulated promoters and physically regulated promoters. For chemically regulated promoters, the transcriptional activity can be regulated by one or more compounds, such as alcohol, tetracycline, galactose, a steroid, a metal, an amino acid, or other compounds. For physically regulated promoters, transcriptional activity can be regulated by a phenomenon such as light or temperature. Non-limiting examples of tetracycline-regulated promoters include anhydrotetracycline (aTc)-responsive promoters and other tetracycline-responsive promoter systems (e.g., a tetracycline repressor protein (tetR), a tetracycline operator sequence (tetO) and a tetracycline transactivator fusion protein (tTA)). Non-limiting examples of steroid-regulated promoters include promoters based on the rat glucocorticoid receptor, human estrogen receptor, moth ecdysone receptors, and promoters from the steroid/retinoid/thyroid receptor superfamily. Non-limiting examples of metal-regulated promoters include promoters derived from metallothionein (proteins that bind and sequester metal ions) genes. Non-limiting examples of pathogenesis-regulated promoters include promoters induced by salicylic acid, ethylene or benzothiadiazole (BTH). Non-limiting examples of temperature/heat-inducible promoters include heat shock promoters. Non-limiting examples of light-regulated promoters include light responsive promoters from plant cells. In certain embodiments, the inducible promoter is a galactose-inducible promoter. In some embodiments, the inducible promoter is induced by one or more physiological conditions (e.g., pH, temperature, radiation, osmotic pressure, saline gradients, cell surface binding, or concentration of one or more extrinsic or intrinsic inducing agents). Non-limiting examples of an extrinsic inducer or inducing agent include amino acids and amino acid analogs, saccharides and polysaccharides, nucleic acids, protein transcriptional activators and repressors, cytokines, toxins, petroleum-based compounds, metal containing compounds, salts, ions, enzyme substrate analogs, hormones or any combination.

[0478] In some embodiments, the promoter is a constitutive promoter. As used in this application, a “constitutive promoter” refers to an unregulated promoter that allows continuous transcription of a gene. Non-limiting examples of a constitutive promoter include TDH3, PGK1, PKC1, PDC1, TEF1, TEF2, RPL18B, SSA1, TDH2, PYK1, TPI1, HXT3, HXT7, ACT1. ADH1, ADH2, ENO2, and SOD1.

[0479] Other inducible promoters or constitutive promoters, including synthetic promoters, that may be known to one of ordinary skill in the art are also contemplated.

[0480] The precise nature of the regulatory sequences needed for gene expression may vary between species or cell types, but generally include, as necessary, 5′ non-transcribed and 5′ non-translated sequences involved with the initiation of transcription and translation respectively, such as a TATA box, capping sequence, CAAT sequence, and the like. In particular, such 5′ non-transcribed regulatory sequences will include a promoter region which includes a promoter sequence for transcriptional control of the operably joined gene. Regulatory sequences may also include enhancer sequences or upstream activator sequences. The vectors disclosed may include 5′ leader or signal sequences. The regulatory sequence may also include a terminator sequence. In some embodiments, a terminator sequence marks the end of a gene in DNA during transcription. The choice and design of one or more appropriate vectors suitable for inducing expression of one or more genes described in this application in a heterologous organism is within the ability and discretion of one of ordinary skill in the art.

[0481] Expression vectors containing the necessary elements for expression are commercially available and known to one of ordinary skill in the art (see, e.g., Sambrook et al., Molecular Cloning: A Laboratory Manual, Fourth Edition, Cold Spring Harbor Laboratory Press, 2012).

### Host Cells

[0482] The disclosed cannabinoid biosynthetic methods and host cells are exemplified with S. cerevisiae, but are also applicable to other host cells, as would be understood by one of ordinary skill in the art.

[0483] Suitable host cells include, but are not limited to: yeast cells, bacterial cells, algal cells, plant cells, fungal cells, insect cells, and animal cells, including mammalian cells. In one illustrative embodiment, suitable host cells include E. coli (e.g., Shuffle™ competent E. coli available from New England BioLabs in Ipswich, Mass.).

[0484] Other suitable host cells of the present disclosure include microorganisms of the genus Corynebacterium. In some embodiments, preferred Corynebacterium strains/species include: C. efficiens, with the deposited type strain being DSM44549, C. glutamicum, with the deposited type strain being ATCC13032, and C. ammoniagenes, with the deposited type strain being ATCC6871. In some embodiments the preferred host cell of the present disclosure is C. glutamicum.

[0485] Suitable host cells of the genus Corynebacterium, in particular of the species Corynebacterium glutamicum, are in particular the known wild-type strains: Corynebacterium glutamicum ATCC13032, Corynebacterium acetoglutamicum ATCC15806, Corynebacterium acetoacidophilum ATCC13870, Corynebacterium melassecola ATCC17965, Corynebacterium thermoaminogenes FERM BP-1539, Brevibacterium flavum ATCC14067, Brevibacterium lactofermentum ATCC13869, and Brevibacterium divaricatum ATCC14020; and L-amino acid-producing mutants, or strains, prepared therefrom, such as, for example, the L-lysine-producing strains: Corynebacterium glutamicum FERM-P 1709, Brevibacterium flavum FERM-P 1708, Brevibacterium lactofermentum FERM-P 1712, Corynebacterium glutamicum FERM-P 6463, Corynebacterium glutamicum FERM-P 6464, Corynebacterium glutamicum DM58-1, Corynebacterium glutamicum DG52-5, Corynebacterium glutamicum DSM5714, and Corynebacterium glutamicum DSM12866.

[0486] Suitable yeast host cells include, but are not limited to: Candida, Hansenula, Saccharomyces, Schizosaccharomyces, Pichia, Kluyveromyces, and Yarrowia. In some embodiments, the yeast cell is Hansenula polymorpha, Saccharomyces cerevisiae, Saccharomyces carlsbergensis, Saccharomyces diastaticus, Saccharomyces norbensis, Saccharomyces kluyveri, Schizosaccharomyces pombe, Komagataella phaffii, formerly known as Pichia pastoris, Pichia finlandica, Pichia trehalophila, Pichia kodamae, Pichia membranaefaciens, Pichia opuntiae, Pichia thermotolerans, Pichia salictaria, Pichia quercuum. Pichia pijperi, Pichia stipitis, Pichia methanolica, Pichia angusta, Kluyveromyces lactis, Candida albicans, or Yarrowia lipolytica.

[0487] In some embodiments, the yeast strain is an industrial polyploid yeast strain. Other non-limiting examples of fungal cells include cells obtained from Aspergillus spp., Penicillium spp., Fusarium spp., Rhizopus spp., Acremonium spp., Neurospora spp., Sordaria spp., Magnaporthe spp., Allomyces spp., Ustilago spp., Botrytis spp., and Trichoderma spp.

[0488] In certain embodiments, the host cell is an algal cell such as, Chlamydomonas (e.g., C. reinhardtii) and Phormidium (P. sp. ATCC29409).

[0489] In other embodiments, the host cell is a prokaryotic cell. Suitable prokaryotic cells include gram positive, gram negative, and gram-variable bacterial cells. The host cell may be a species of, but not limited to: Agrobacterium, Alicyclobacillus, Anabaena, Anacyslis, Acinetobacter, Acidothermus, Arthrobacter, Azobacter, Bacillus, Bifidobacterium, Brevibacterium, Butyrivibrio, Buchnera, Campestris, Camplyobacter, Clostridium, Corynebacterium, Chromatium, Coprococcus, Escherichia, Enterococcus, Enterobacter, Erwinia, Fusobacterium, Faecalibacterium, Francisella, Flavobacterium, Geobacillus, Haemophilus, Helicobacter, Klebsiella, Lactobacillus, Lactococcus, Ilyobacter, Micrococcus, Microbacterium, Mesorhizobium, Methylobacterium, Methylobacterium, Mycobacterium, Neisseria, Pantoea, Pseudomonas, Prochlorococcus, Rhodobacter, Rhodopseudomonas, Rhodopseudomonas, Roseburia, Rhodospirillum, Rhodococcus, Scenedesmus, Streptomyces, Streptococcus, Synechococcus, Saccharomonospora, Saccharopolyspora, Staphylococcus Serratia, Salmonella, Shugella, Thermoanaerobacterium, Tropheryma, Tularensis, Temecula, Thermosynechococcus, Thermococcus, Ureaplasma, Xanthomonas, Xylella, Yersinia, and Zymomonas.

[0490] In some embodiments, the bacterial host strain is an industrial strain. Numerous bacterial industrial strains are known and suitable for the methods and compositions described in this application.

[0491] In some embodiments, the bacterial host cell is of the Agrobacterium species (e.g., A. radiobacter, A. rhizogenes. A. rubi), the Arthrobacterspecies (e.g., A. aurescens, A. citreus, A. globformis, A. hydrocarboglutamicus, A. mysorens, A. nicotianae, A. paraffineus, A. protophonniae, A. roseoparaffinus, A. sulfureus, A. ureafaciens), the Bacillus species (e.g., B. thuringiensis. B. anthracis. B. megaterium, B. subtilis. B. lentus, B. circulars. B. pumilus, B. lautus, B. coagulans, B. brevis, B. firmus, B. alkaophius, B. licheniformis, B. clausii, B. stearothermophilus, B. halodurans and B. amyloliquefaciens. In particular embodiments, the host cell will be an industrial Bacillus strain including but not limited to B. subtilis. B. pumilus, B. licheniformis, B. megaterium, B. clausii, B. stearothermophilus and B. amyloliquefaciens. In some embodiments, the host cell will be an industrial Clostridium species (e.g., C. acetobutylicum, C. tetani E88, C. lituseburense, C. saccharobutylicum, C. perfringens, C. beijerinckii). In some embodiments, the host cell will be an industrial Corynebacterium species (e.g., C. glutamicum, C. acetoacidophilum). In some embodiments, the host cell will be an industrial Escherichia species (e.g., E. coli). In some embodiments, the host cell will be an industrial Erwinia species (e.g., E. uredovora, E. carotovora, E. ananas, E. herbicola, E. punctata, E. terreus). In some embodiments, the host cell will be an industrial Pantoea species (e.g., P. citrea, P. agglomerans). In some embodiments, the host cell will be an industrial Pseudomonas species, (e.g., P. putida, P. aeruginosa, P. mevalonii). In some embodiments, the host cell will be an industrial Streptococcus species (e.g., S. equisimiles, S. pyogenes, S. uberis). In some embodiments, the host cell will be an industrial Streptomyces species (e.g., S. ambofaciens, S. achromogenes, S. avermitilis, S. coelicolor, S. aureofaciens, S. aureus, S. fungicidicus, S. griseus, S. lividans). In some embodiments, the host cell will be an industrial Zymomonas species (e.g., Z. mobilis, Z. lipolytica), and the like.

[0492] The present disclosure is also suitable for use with a variety of animal cell types, including mammalian cells, for example, human (including 293, HeLa, W138. PER.C6 and Bowes melanoma cells), mouse (including 3T3, NS0, NS1, Sp2/0), hamster (CHO, BHK), monkey (COS. FRhL, Vero), insect cells, for example fall armyworm (including Sf9 and Sf21), silkmoth (including BmN), cabbage looper (including BTI-Tn-5B1-4) and common fruit fly (including Schneider 2), and hybridoma cell lines.

[0493] In various embodiments, strains that may be used in the practice of the disclosure including both prokaryotic and eukaryotic strains, and are readily accessible to the public from a number of culture collections such as American Type Culture Collection (ATCC), Deutsche Sammlung von Mikroorganismen and Zellkulturen GmbH (DSM), Centraalbureau Voor Schimmelcultures (CBS), and Agricultural Research Service Patent Culture Collection, Northern Regional Research Center (NRRL). The present disclosure is also suitable for use with a variety of plant cell types. In some embodiments, the plant is of the Cannabis genus in the family Cannabaceae. In certain embodiments, the plant is of the species Cannabis sativa, Cannabis indica, or Cannabis ruderalis. In other embodiments, the plant is of the genus Nicotiana in the family Solanaceae. In certain embodiments, the plant is of the species Nicotiana rustica.

[0494] The term “cell,” as used in this application, may refer to a single cell or a population of cells, such as a population of cells belonging to the same cell line or strain. Use of the singular term “cell” should not be construed to refer explicitly to a single cell rather than a population of cells. The host cell may comprise genetic modifications relative to a wild-type counterpart. Reduction of gene expression and/or gene inactivation in a host cell may be achieved through any suitable method, including but not limited to, deletion of the gene, introduction of a point mutation into the gene, selective editing of the gene and/or truncation of the gene. For example, polymerase chain reaction (PCR)-based methods may be used (see, e.g., Gardner et al., Methods Mol Biol. 2014; 1205:45-78). As a non-limiting example, genes may be deleted through gene replacement (e.g., with a marker, including a selection marker). A gene may also be truncated through the use of a transposon system (see, e.g., Poussu et al., Nucleic Acids Res. 2005; 33(12): e104). A gene may also be edited through of the use of gene editing technologies known in the art, such as CRISPR-based technologies.

### Culturing of Host Cells

[0495] Any of the cells disclosed in this application can be cultured in media of any type (rich or minimal) and any composition prior to, during, and/or after contact and/or integration of a nucleic acid. The conditions of the culture or culturing process can be optimized through routine experimentation as would be understood by one of ordinary skill in the art. In some embodiments, the selected media is supplemented with various components. In some embodiments, the concentration and amount of a supplemental component is optimized. In some embodiments, other aspects of the media and growth conditions (e.g., pH, temperature, etc.) are optimized through routine experimentation. In some embodiments, the frequency that the media is supplemented with one or more supplemental components, and the amount of time that the cell is cultured, is optimized.

[0496] Culturing of the cells described in this application can be performed in culture vessels known and used in the art. In some embodiments, an aerated reaction vessel (e.g., a stirred tank reactor) is used to culture the cells. In some embodiments, a bioreactor or fermenter is used to culture the cell. Thus, in some embodiments, the cells are used in fermentation. As used in this application, the terms “bioreactor” and “fermenter” are interchangeably used and refer to an enclosure, or partial enclosure, in which a biological, biochemical and/or chemical reaction takes place that involves a living organism or part of a living organism. A “large-scale bioreactor” or “industrial-scale bioreactor” is a bioreactor that is used to generate a product on a commercial or quasi-commercial scale. Large scale bioreactors typically have volumes in the range of liters, hundreds of liters, thousands of liters, or more.

[0497] Non-limiting examples of bioreactors include: stirred tank fermenters, bioreactors agitated by rotating mixing devices, chemostats, bioreactors agitated by shaking devices, airlift fermenters, packed-bed reactors, fixed-bed reactors, fluidized bed bioreactors, bioreactors employing wave induced agitation, centrifugal bioreactors, roller bottles, and hollow fiber bioreactors, roller apparatuses (for example benchtop, cart-mounted, and/or automated varieties), vertically-stacked plates, spinner flasks, stirring or rocking flasks, shaken multi-well plates, MD bottles, T-flasks. Roux bottles, multiple-surface tissue culture propagators, modified fermenters, and coated beads (e.g. beads coated with serum proteins, nitrocellulose, or carboxymethyl cellulose to prevent cell attachment).

[0498] In some embodiments, the bioreactor includes a cell culture system where the cell (e.g., yeast cell) is in contact with moving liquids and/or gas bubbles. In some embodiments, the cell or cell culture is grown in suspension. In other embodiments, the cell or cell culture is attached to a solid phase carrier. Non-limiting examples of a carrier system includes microcarriers (e.g., polymer spheres, microbeads, and microdisks that can be porous or non-porous), cross-linked beads (e.g., dextran) charged with specific chemical groups (e.g., tertiary amine groups), 2D microcarriers including cells trapped in nonporous polymer fibers, 3D carriers (e.g., carrier fibers, hollow fibers, multicartridge reactors, and semi-permeable membranes that can comprising porous fibers), microcarriers having reduced ion exchange capacity, encapsulation cells, capillaries, and aggregates. In some embodiments, carriers are fabricated from materials such as dextran, gelatin, glass, or cellulose.

[0499] In some embodiments, industrial-scale processes are operated in continuous, semi-continuous or non-continuous modes. Non-limiting examples of operation modes are batch, fed batch, extended batch, repetitive batch, draw/fill, rotating-wall, spinning flask, and/or perfusion mode of operation. In some embodiments, a bioreactor allows continuous or semi-continuous replenishment of the substrate stock, for example a carbohydrate source and/or continuous or semi-continuous separation of the product, from the bioreactor.

[0500] In some embodiments, the bioreactor or fermenter includes a sensor and/or a control system to measure and/or adjust reaction parameters. Non-limiting examples of reaction parameters include biological parameters (e.g., growth rate, cell size, cell number, cell density, cell type, or cell state, etc.), chemical parameters (e.g., pH, redox-potential, concentration of reaction substrate and/or product, concentration of dissolved gases, such as oxygen concentration and CO₂ concentration, nutrient concentrations, metabolite concentrations, concentration of an oligopeptide, concentration of an amino acid, concentration of a vitamin, concentration of a hormone, concentration of an additive, serum concentration, ionic strength, concentration of an ion, relative humidity, molarity, osmolarity, concentration of other chemicals, for example buffering agents, adjuvants, or reaction by-products), physical/mechanical parameters (e.g., density, conductivity, degree of agitation, pressure, and flow rate, shear stress, shear rate, viscosity, color, turbidity, light absorption, mixing rate, conversion rate, as well as thermodynamic parameters, such as temperature, light intensity/quality, etc.). Sensors to measure the parameters described in this application are well known to one of ordinary skill in the relevant mechanical and electronic arts. Control systems to adjust the parameters in a bioreactor based on the inputs from a sensor described in this application are well known to one of ordinary skill in the art in bioreactor engineering.

[0501] In some embodiments, the method involves batch fermentation (e.g., shake flask fermentation). General considerations for batch fermentation (e.g., shake flask fermentation) include the level of oxygen and glucose. For example, batch fermentation (e.g., shake flask fermentation) may be oxygen and glucose limited, so in some embodiments, the capability of a strain to perform in a well-designed fed-batch fermentation is underestimated. Also, the final product (e.g., cannabinoid or cannabinoid precursor) may display some differences from the substrate in terms of solubility, toxicity, cellular accumulation and secretion and in some embodiments can have different fermentation kinetics.

[0502] In some embodiments, the cells of the present disclosure are adapted to produce cannabinoids or cannabinoid precursors in vivo. In some embodiments, the cells are adapted to secrete one or more enzymes for cannabinoid synthesis (e.g., AAE, PKS, PKC, PT, or TS). In some embodiments, the cells of the present disclosure are lysed, and the lysate is recovered for subsequent use. In such embodiments, the secreted or lysed enzyme can catalyze reactions for the production of a cannabinoid or precursor by bioconversion in an in vitro or ex vivo process. In some embodiments, any and all conversions described in this application can be conducted chemically or enzymatically, in vitro or in vivo.

[0503] In some embodiments, the host cells of the present disclosure are adapted to produce cannabinoids or cannabinoid precursors in vivo. In some embodiments, the host cells are adapted to secrete one or more cannabinoid pathway substrates, intermediates, and/or terminal products (e.g., olivetol, THCA, THC, CBDA, CBD, CBGA, CBGVA, THCVA, CBDVA, CBCVA, or CBCA). In some embodiments, the host cells of the present disclosure are lysed, and the lysate is recovered for subsequent use. In such embodiments, the secreted substrates, intermediates, and/or terminal products may be recovered from the culture media.

### Purification and Further Processing

[0504] In some embodiments, any of the methods described in this application may include isolation and/or purification of the cannabinoids and/or cannabinoid precursors produced (e.g., produced in a bioreactor). For example, the isolation and/or purification can involve one or more of cell lysis, centrifugation, extraction, column chromatography, distillation, crystallization, and lyophilization.

[0505] The methods described in this application encompass production of any cannabinoid or cannabinoid precursor known in the art. Cannabinoids or cannabinoid precursors produced by any of the recombinant cells disclosed in this application or any of the in vitro methods described in this application may be identified and extracted using any method known in the art. Mass spectrometry (e.g., LC-MS, GC-MS) is a non-limiting example of a method for identification and may be used to extract a compound of interest.

[0506] In some embodiments, any of the methods described in this application further comprise decarboxylation of a cannabinoid or cannabinoid precursor. As a non-limiting example, the acid form of a cannabinoid or cannabinoid precursor may be heated (e.g., at least 90° C.) to decarboxylate the cannabinoid or cannabinoid precursor. See, e.g., U.S. Pat. Nos. 10,159,908, 10,143,706, 9,908,832 and 7,344,736. See also, e.g., Wang et al., Cannabis Cannabinoid Res. 2016; 1(1): 262-271.

### Compositions, Kits, and Administration

[0507] The present disclosure provides compositions, including pharmaceutical compositions, comprising a cannabinoid or a cannabinoid precursor, or pharmaceutically acceptable salt thereof, produced by any of the methods described in this application, and optionally a pharmaceutically acceptable excipient.

[0508] In certain embodiments, a cannabinoid or cannabinoid precursor described in this application is provided in an effective amount in a composition, such as a pharmaceutical composition. In certain embodiments, the effective amount is a therapeutically effective amount. In certain embodiments, the effective amount is a prophylactically effective amount.

[0509] Compositions, such as pharmaceutical compositions, described in this application can be prepared by any method known in the art. In general, such preparatory methods include bringing a compound described in this application (i.e., the “active ingredient”) into association with a carrier or excipient, and/or one or more other accessory ingredients, and then, if necessary and/or desirable, shaping, and/or packaging the product into a desired single- or multi-dose unit.

[0510] Pharmaceutical compositions can be prepared, packaged, and/or sold in bulk, as a single unit dose, and/or as a plurality of single unit doses. A “unit dose” is a discrete amount of the pharmaceutical composition comprising a predetermined amount of the active ingredient. The amount of the active ingredient is generally equal to the dosage of the active ingredient which would be administered to a subject and/or a convenient fraction of such a dosage, such as one-half or one-third of such a dosage.

[0511] Relative amounts of the active ingredient, the pharmaceutically acceptable excipient, and/or any additional ingredients in a pharmaceutical composition described in this application will vary, depending upon the identity, size, and/or condition of the subject treated and further depending upon the route by which the composition is to be administered. The composition may comprise between 0.1% and 100% (w/w) active ingredient.

[0512] Pharmaceutically acceptable excipients used in the manufacture of pharmaceutical compositions include inert diluents, dispersing and/or granulating agents, surface active agents and/or emulsifiers, disintegrating agents, binding agents, preservatives, buffering agents, lubricating agents, and/or oils. Excipients such as cocoa butter and suppository waxes, coloring agents, coating agents, sweetening, flavoring, and perfuming agents may also be present in the composition. Exemplary excipients include diluents, dispersing and/or granulating agents, surface active agents and/or emulsifiers, disintegrating agents, binding agents, preservatives, buffering agents, lubricating agents, and/or oils (e.g., synthetic oils, semi-synthetic oils) as disclosed in this application.

[0513] Exemplary diluents include calcium carbonate, sodium carbonate, calcium phosphate, dicalcium phosphate, calcium sulfate, calcium hydrogen phosphate, sodium phosphate lactose, sucrose, cellulose, microcrystalline cellulose, kaolin, mannitol, sorbitol, inositol, sodium chloride, dry starch, cornstarch, powdered sugar, and mixtures thereof.

[0514] Exemplary granulating and/or dispersing agents include potato starch, corn starch, tapioca starch, sodium starch glycolate, clays, alginic acid, guar gum, citrus pulp, agar, bentonite, cellulose, and wood products, natural sponge, cation-exchange resins, calcium carbonate, silicates, sodium carbonate, cross-linked poly(vinyl-pyrrolidone) (crospovidone), sodium carboxymethyl starch (sodium starch glycolate), carboxymethyl cellulose, cross-linked sodium carboxymethyl cellulose (croscarmellose), methylcellulose, pregelatinized starch (starch 1500), microcrystalline starch, water insoluble starch, calcium carboxymethyl cellulose, magnesium aluminum silicate (Veegum), sodium lauryl sulfate, quaternary ammonium compounds, and mixtures thereof.

[0515] Exemplary surface active agents and/or emulsifiers include natural emulsifiers (e.g., acacia, agar, alginic acid, sodium alginate, tragacanth, chondrux, cholesterol, xanthan, pectin, gelatin, egg yolk, casein, wool fat, cholesterol, wax, and lecithin), colloidal clays (e.g., bentonite (aluminum silicate) and Veegum (magnesium aluminum silicate)), long chain amino acid derivatives, high molecular weight alcohols (e.g., stearyl alcohol, cetyl alcohol, oleyl alcohol, triacetin monostearate, ethylene glycol distearate, glyceryl monostearate, and propylene glycol monostearate, polyvinyl alcohol), carbomers (e.g., carboxy polymethylene, polyacrylic acid, acrylic acid polymer, and carboxyvinyl polymer), carrageenan, cellulosic derivatives (e.g., carboxymethylcellulose sodium, powdered cellulose, hydroxymethyl cellulose, hydroxypropyl cellulose, hydroxypropyl methylcellulose, methylcellulose), sorbitan fatty acid esters (e.g., polyoxyethylene sorbitan monolaurate (Tween® 20), polyoxyethylene sorbitan (Tween® 60), polyoxyethylene sorbitan monooleate (Tween® 80), sorbitan monopalmitate (Span® 40), sorbitan monostearate (Span® 60), sorbitan tristearate (Span® 65), glyceryl monooleate, sorbitan monooleate (Span® 80), polyoxyethylene esters (e.g., polyoxyethylene monostearate (Myrj® 45), polyoxyethylene hydrogenated castor oil, polyethoxylated castor oil, polyoxymethylene stearate, and Solutol®), sucrose fatty acid esters, polyethylene glycol fatty acid esters (e.g., Cremophor®), polyoxyethylene ethers, (e.g., polyoxyethylene lauryl ether (Brij® 30)), poly(vinyl-pyrrolidone), diethylene glycol monolaurate, triethanolamine oleate, sodium oleate, potassium oleate, ethyl oleate, oleic acid, ethyl laurate, sodium lauryl sulfate. Pluronic® F-68, poloxamer P-188, cetrimonium bromide, cetylpyridinium chloride, benzalkonium chloride, docusate sodium, and/or mixtures thereof.

[0516] Exemplary binding agents include starch (e.g., cornstarch and starch paste), gelatin, sugars (e.g., sucrose, glucose, dextrose, dextrin, molasses, lactose, lactitol, mannitol, etc.), natural and synthetic gums (e.g., acacia, sodium alginate, extract of Irish moss, panwar gum, ghatti gum, mucilage of isapol husks, carboxymethylcellulose, methylcellulose, ethylcellulose, hydroxyethylcellulose, hydroxypropyl cellulose, hydroxypropyl methylcellulose, microcrystalline cellulose, cellulose acetate, poly(vinyl-pyrrolidone), magnesium aluminum silicate (Veegum®), and larch arabogalactan), alginates, polyethylene oxide, polyethylene glycol, inorganic calcium salts, silicic acid, polymethacrylates, waxes, water, alcohol, and/or mixtures thereof.

[0517] Exemplary preservatives include antioxidants, chelating agents, antimicrobial preservatives, antifungal preservatives, antiprotozoan preservatives, alcohol preservatives, acidic preservatives, and other preservatives. In certain embodiments, the preservative is an antioxidant. In other embodiments, the preservative is a chelating agent.

[0518] Exemplary antioxidants include alpha tocopherol, ascorbic acid, acorbyl palmitate, butylated hydroxyanisole, butylated hydroxytoluene, monothioglycerol, potassium metabisulfite, propionic acid, propyl gallate, sodium ascorbate, sodium bisulfite, sodium metabisulfite, and sodium sulfite.

[0519] Exemplary chelating agents include ethylenediaminetetraacetic acid (EDTA) and salts and hydrates thereof (e.g., sodium edetate, disodium edetate, trisodium edetate, calcium disodium edetate, dipotassium edetate, and the like), citric acid and salts and hydrates thereof (e.g., citric acid monohydrate), fumaric acid and salts and hydrates thereof, malic acid and salts and hydrates thereof, phosphoric acid and salts and hydrates thereof, and tartaric acid and salts and hydrates thereof. Exemplary antimicrobial preservatives include benzalkonium chloride, benzethonium chloride, benzyl alcohol, bronopol, cetrimide, cetylpyridinium chloride, chlorhexidine, chlorobutanol, chlorocresol, chloroxylenol, cresol, ethyl alcohol, glycerin, hexetidine, imidurea, phenol, phenoxyethanol, phenylethyl alcohol, phenylmercuric nitrate, propylene glycol, and thimerosal.

[0520] Exemplary antifungal preservatives include butyl paraben, methyl paraben, ethyl paraben, propyl paraben, benzoic acid, hydroxybenzoic acid, potassium benzoate, potassium sorbate, sodium benzoate, sodium propionate, and sorbic acid.

[0521] Exemplary alcohol preservatives include ethanol, polyethylene glycol, phenol, phenolic compounds, bisphenol, chlorobutanol, hydroxybenzoate, and phenylethyl alcohol.

[0522] Exemplary acidic preservatives include vitamin A, vitamin C, vitamin E, beta-carotene, citric acid, acetic acid, dehydroacetic acid, ascorbic acid, sorbic acid, and phytic acid.

[0523] Other preservatives include tocopherol, tocopherol acetate, deteroxime mesylate, cetrimide, butylated hydroxyanisol (BHA), butylated hydroxytoluened (BHT), ethylenediamine, sodium lauryl sulfate (SLS), sodium lauryl ether sulfate (SLES), sodium bisulfite, sodium metabisulfite, potassium sulfite, potassium metabisulfite, Glydant® Plus, Phenonip®, methylparaben, Germall® 115, Germaben® II, Neolone®, Kathon®, and Euxyl®.

[0524] Exemplary buffering agents include citrate buffer solutions, acetate buffer solutions, phosphate buffer solutions, ammonium chloride, calcium carbonate, calcium chloride, calcium citrate, calcium glubionate, calcium gluceptate, calcium gluconate, D-gluconic acid, calcium glycerophosphate, calcium lactate, propanoic acid, calcium levulinate, pentanoic acid, dibasic calcium phosphate, phosphoric acid, tribasic calcium phosphate, calcium hydroxide phosphate, potassium acetate, potassium chloride, potassium gluconate, potassium mixtures, dibasic potassium phosphate, monobasic potassium phosphate, potassium phosphate mixtures, sodium acetate, sodium bicarbonate, sodium chloride, sodium citrate, sodium lactate, dibasic sodium phosphate, monobasic sodium phosphate, sodium phosphate mixtures, tromethamine, magnesium hydroxide, aluminum hydroxide, alginic acid, pyrogen-free water, isotonic saline, Ringer's solution, ethyl alcohol, and mixtures thereof.

[0525] Exemplary lubricating agents include magnesium stearate, calcium stearate, stearic acid, silica, talc, malt, glyceryl behanate, hydrogenated vegetable oils, polyethylene glycol, sodium benzoate, sodium acetate, sodium chloride, leucine, magnesium lauryl sulfate, sodium lauryl sulfate, and mixtures thereof.

[0526] Exemplary natural oils include almond, apricot kernel, avocado, babassu, bergamot, black current seed, borage, cade, camomile, canola, caraway, carnauba, castor, cinnamon, cocoa butter, coconut, cod liver, coffee, corn, cotton seed, emu, eucalyptus, evening primrose, fish, flaxseed, geraniol, gourd, grape seed, hazel nut, hyssop, isopropyl myristate, jojoba, kukui nut, lavandin, lavender, lemon, litsea cubeba, macademia nut, mallow, mango seed, meadowfoam seed, mink, nutmeg, olive, orange, orange roughy, palm, palm kernel, peach kernel, peanut, poppy seed, pumpkin seed, rapeseed, rice bran, rosemary, safflower, sandalwood, sasquana, savoury, sea buckthorn, sesame, shea butter, silicone, soybean, sunflower, tea tree, thistle, tsubaki, vetiver, walnut, and wheat germ oils. Exemplary synthetic or semi-synthetic oils include, but are not limited to, butyl stearate, medium chain triglycerides (such as caprylic triglyceride and capric triglyceride), cyclomethicone, diethyl sebacate, dimethicone 360, isopropyl myristate, mineral oil, octyldodecanol, oleyl alcohol, silicone oil, and mixtures thereof. In certain embodiments, exemplary synthetic oils comprise medium chain triglycerides (such as caprylic triglyceride and capric triglyceride).

[0527] Liquid dosage forms for oral and parenteral administration include pharmaceutically acceptable emulsions, microemulsions, solutions, suspensions, syrups and elixirs. In addition to the active ingredients, the liquid dosage forms may comprise inert diluents commonly used in the art such as, for example, water or other solvents, solubilizing agents and emulsifiers such as ethyl alcohol, isopropyl alcohol, ethyl carbonate, ethyl acetate, benzyl alcohol, benzyl benzoate, propylene glycol, 1,3-butylene glycol, dimethylformamide, oils (e.g., cottonseed, groundnut, corn, germ, olive, castor, and sesame oils), glycerol, tetrahydrofurfuryl alcohol, polyethylene glycols and fatty acid esters of sorbitan, and mixtures thereof. Besides inert diluents, the oral compositions can include adjuvants such as wetting agents, emulsifying and suspending agents, sweetening, flavoring, and perfuming agents. In certain embodiments for parenteral administration, the conjugates described in this application are mixed with solubilizing agents such as Cremophor®, alcohols, oils, modified oils, glycols, polysorbates, cyclodextrins, polymers, and mixtures thereof.

[0528] Injectable preparations, for example, sterile injectable aqueous or oleaginous suspensions can be formulated according to the known art using suitable dispersing or wetting agents and suspending agents. The sterile injectable preparation can be a sterile injectable solution, suspension, or emulsion in a nontoxic parenterally acceptable diluent or solvent, for example, as a solution in 1,3-butanediol. Among the acceptable vehicles and solvents that can be employed are water, Ringer's solution, U.S.P., and isotonic sodium chloride solution. In addition, sterile, fixed oils are conventionally employed as a solvent or suspending medium. For this purpose, any bland fixed oil can be employed including synthetic mono- or di-glycerides. In addition, fatty acids such as oleic acid are used in the preparation of injectables.

[0529] The injectable formulations can be sterilized, for example, by filtration through a bacterial-retaining filter, or by incorporating sterilizing agents in the form of sterile solid compositions which can be dissolved or dispersed in sterile water or other sterile injectable medium prior to use.

[0530] In order to prolong the effect of a drug, it is often desirable to slow the absorption of the drug from subcutaneous or intramuscular injection. This can be accomplished by the use of a liquid suspension of crystalline or amorphous material with poor water solubility. The rate of absorption of the drug then depends upon its rate of dissolution, which, in turn, may depend upon crystal size and crystalline form. Alternatively, delayed absorption of a parenterally administered drug form may be accomplished by dissolving or suspending the drug in an oil vehicle.

[0531] Compositions for rectal or vaginal administration are typically suppositories which can be prepared by mixing the conjugates described in this application with suitable non-irritating excipients or carriers such as cocoa butter, polyethylene glycol, or a suppository wax which are solid at ambient temperature but liquid at body temperature and therefore melt in the rectum or vaginal cavity and release the active ingredient.

[0532] Solid dosage forms for oral administration include capsules, tablets, pills, powders, and granules. In such solid dosage forms, the active ingredient is mixed with at least one inert, pharmaceutically acceptable excipient or carrier such as sodium citrate or dicalcium phosphate and/or (a) fillers or extenders such as starches, lactose, sucrose, glucose, mannitol, and silicic acid, (b) binders such as, for example, carboxymethylcellulose, alginates, gelatin, polyvinylpyrrolidinone, sucrose, and acacia, (c) humectants such as glycerol, (d) disintegrating agents such as agar, calcium carbonate, potato or tapioca starch, alginic acid, certain silicates, and sodium carbonate, (e) solution retarding agents such as paraffin, (f) absorption accelerators such as quaternary ammonium compounds, (g) wetting agents such as, for example, cetyl alcohol and glycerol monostearate, (h) absorbents such as kaolin and bentonite clay, and (i) lubricants such as talc, calcium stearate, magnesium stearate, solid polyethylene glycols, sodium lauryl sulfate, and mixtures thereof. In the case of capsules, tablets, and pills, the dosage form may include a buffering agent.

[0533] Solid compositions of a similar type can be employed as fillers in soft and hard-filled gelatin capsules using such excipients as lactose or milk sugar as well as high molecular weight polyethylene glycols and the like. The solid dosage forms of tablets, dragees, capsules, pills, and granules can be prepared with coatings and shells such as enteric coatings and other coatings well known in the art of pharmacology. They may optionally comprise opacifying agents and can be of a composition that they release the active ingredient(s) only, or preferentially, in a certain part of the intestinal tract, optionally, in a delayed manner. Examples of encapsulating compositions which can be used include polymeric substances and waxes. Solid compositions of a similar type can be employed as fillers in soft and hard-filled gelatin capsules using such excipients as lactose or milk sugar as well as high molecular weight polethylene glycols and the like.

[0534] The active ingredient can be in a micro-encapsulated form with one or more excipients as noted above. The solid dosage forms of tablets, dragees, capsules, pills, and granules can be prepared with coatings and shells such as enteric coatings, release controlling coatings, and other coatings well known in the pharmaceutical formulating art. In such solid dosage forms the active ingredient can be admixed with at least one inert diluent such as sucrose, lactose, or starch. Such dosage forms may comprise, as is normal practice, additional substances other than inert diluents, e.g., tableting lubricants and other tableting aids such a magnesium stearate and microcrystalline cellulose. In the case of capsules, tablets and pills, the dosage forms may comprise buffering agents. They may optionally comprise opacifying agents and can be of a composition that they release the active ingredient(s) only, or preferentially, in a certain part of the intestinal tract, optionally, in a delayed manner. Examples of encapsulating agents which can be used include polymeric substances and waxes.

[0535] Dosage forms for topical and/or transdermal administration of a compound described in this application may include ointments, pastes, creams, lotions, gels, powders, solutions, sprays, inhalants, and/or patches. Generally, the active ingredient is admixed under sterile conditions with a pharmaceutically acceptable carrier or excipient and/or any needed preservatives and/or buffers as can be required. Additionally, the present disclosure contemplates the use of transdermal patches, which often have the added advantage of providing controlled delivery of an active ingredient to the body. Such dosage forms can be prepared, for example, by dissolving and/or dispensing the active ingredient in the proper medium. Alternatively or additionally, the rate can be controlled by either providing a rate controlling membrane and/or by dispersing the active ingredient in a polymer matrix and/or gel.

[0536] Suitable devices for use in delivering intradermal pharmaceutical compositions described in this application include short needle devices. Intradermal compositions can be administered by devices which limit the effective penetration length of a needle into the skin. Alternatively or additionally, conventional syringes can be used in the classical mantoux method of intradermal administration. Jet injection devices which deliver liquid formulations to the dermis via a liquid jet injector and/or via a needle which pierces the stratum corneum and produces a jet which reaches the dermis are suitable. Ballistic powder/particle delivery devices which use compressed gas to accelerate the compound in powder form through the outer layers of the skin to the dermis are suitable.

[0537] Formulations suitable for topical administration include, but are not limited to, liquid and/or semi-liquid preparations such as liniments, lotions, oil-in-water and/or water-in-oil emulsions such as creams, ointments, and/or pastes, and/or solutions and/or suspensions. Topically administrable formulations may, for example, comprise from about 1% to about 10% (w/w) active ingredient, although the concentration of the active ingredient can be as high as the solubility limit of the active ingredient in the solvent. Formulations for topical administration may further comprise one or more of the additional ingredients described in this application.

[0538] A pharmaceutical composition described in this application can be prepared, packaged, and/or sold in a formulation suitable for pulmonary administration via the buccal cavity. Such a formulation may comprise dry particles which comprise the active ingredient and which have a diameter in the range from about 0.5 to about 7 nanometers, or from about 1 to about 6 nanometers. Such compositions are conveniently in the form of dry powders for administration using a device comprising a dry powder reservoir to which a stream of propellant can be directed to disperse the powder and/or using a self-propelling solvent/powder dispensing container such as a device comprising the active ingredient dissolved and/or suspended in a low-boiling propellant in a sealed container. Such powders comprise particles wherein at least 98% of the particles by weight have a diameter greater than 0.5 nanometers and at least 95% of the particles by number have a diameter less than 7 nanometers. Alternatively, at least 95% of the particles by weight have a diameter greater than 1 nanometer and at least 90% of the particles by number have a diameter less than 6 nanometers. Dry powder compositions may include a solid fine powder diluent such as sugar and are conveniently provided in a unit dose form.

[0539] Low boiling propellants generally include liquid propellants having a boiling point of below 65° F. at atmospheric pressure. Generally, the propellant may constitute 50 to 99.9% (w/w) of the composition, and the active ingredient may constitute 0.1 to 20% (w/w) of the composition. The propellant may further comprise additional ingredients such as a liquid non-ionic and/or solid anionic surfactant and/or a solid diluent (which may have a particle size of the same order as particles comprising the active ingredient).

[0540] Although the descriptions of pharmaceutical compositions provided in this application are principally directed to pharmaceutical compositions which are suitable for administration to humans, it will be understood by the skilled artisan that such compositions are generally suitable for administration to animals of all sorts. Modification of pharmaceutical compositions suitable for administration to humans in order to render the compositions suitable for administration to various animals is well understood, and the ordinarily skilled veterinary pharmacologist can design and/or perform such modification with ordinary experimentation.

[0541] Compounds provided in this application are typically formulated in dosage unit form for ease of administration and uniformity of dosage. It will be understood, however, that the total daily usage of the compositions described in this application will be decided by a physician within the scope of sound medical judgment. The specific therapeutically effective dose level for any particular subject or organism will depend upon a variety of factors including the disease being treated and the severity of the disorder; the activity of the specific active ingredient employed; the specific composition employed; the age, body weight, general health, sex, and diet of the subject; the time of administration, route of administration, and rate of excretion of the specific active ingredient employed; the duration of the treatment; drugs used in combination or coincidental with the specific active ingredient employed; and like factors well known in the medical arts.

[0542] The compounds and compositions provided in this application can be administered by any route, including enteral (e.g., oral), parenteral, intravenous, intramuscular, intra-arterial, intramedullary, intrathecal, subcutaneous, intraventricular, transdermal, interdermal, rectal, intravaginal, intraperitoneal, topical (as by powders, ointments, creams, and/or drops), mucosal, nasal, bucal, sublingual; by intratracheal instillation, bronchial instillation, and/or inhalation, and/or as an oral spray, nasal spray, and/or aerosol. Specifically contemplated routes are oral administration, intravenous administration (e.g., systemic intravenous injection), regional administration via blood and/or lymph supply, and/or direct administration to an affected site. In general, the most appropriate route of administration will depend upon a variety of factors including the nature of the agent (e.g., its stability in the environment of the gastrointestinal tract), and/or the condition of the subject (e.g., whether the subject is able to tolerate oral administration).

[0543] In some embodiments, compounds or compositions disclosed in this application are formulated and/or administered in nanoparticles. Nanoparticles are particles in the nanoscale. In some embodiments, nanoparticles are less than 1 μm in diameter. In some embodiments, nanoparticles are between about 1 and 100 nm in diameter. Nanoparticles include organic nanoparticles, such as dendrimers, liposomes, or polymeric nanoparticles. Nanoparticles also include inorganic nanoparticles, such as fullerenes, quantum dots, and gold nanoparticles. Compositions may comprise an aggregate of nanoparticles. In some embodiments, the aggregate of nanoparticles is homogeneous, while in other embodiments the aggregate of nanoparticles is heterogeneous.

[0544] The exact amount of a compound required to achieve an effective amount will vary from subject to subject, depending, for example, on species, age, and general condition of a subject, severity of the side effects or disorder, identity of the particular compound, mode of administration, and the like. An effective amount may be included in a single dose (e.g., single oral dose) or multiple doses (e.g., multiple oral doses). In certain embodiments, when multiple doses are administered to a subject or applied to a tissue or cell, any two doses of the multiple doses include different or substantially the same amounts of a compound described in this application. In certain embodiments, when multiple doses are administered to a subject or applied to a tissue or cell, the frequency of administering the multiple doses to the subject or applying the multiple doses to the tissue or cell is three doses a day, two doses a day, one dose a day, one dose every other day, one dose every third day, one dose every week, one dose every two weeks, one dose every three weeks, or one dose every four weeks. In certain embodiments, the frequency of administering the multiple doses to the subject or applying the multiple doses to the tissue or cell is one dose per day. In certain embodiments, the frequency of administering the multiple doses to the subject or applying the multiple doses to the tissue or cell is two doses per day. In certain embodiments, the frequency of administering the multiple doses to the subject or applying the multiple doses to the tissue or cell is three doses per day. In certain embodiments, when multiple doses are administered to a subject or applied to a tissue or cell, the duration between the first dose and last dose of the multiple doses is one day, two days, four days, one week, two weeks, three weeks, one month, two months, three months, four months, six months, nine months, one year, two years, three years, four years, five years, seven years, ten years, fifteen years, twenty years, or the lifetime of the subject, tissue, or cell. In certain embodiments, the duration between the first dose and last dose of the multiple doses is three months, six months, or one year. In certain embodiments, the duration between the first dose and last dose of the multiple doses is the lifetime of the subject, tissue, or cell. In certain embodiments, a dose (e.g., a single dose, or any dose of multiple doses) described in this application includes independently between 0.1 μg and 1 μg, between 0.001 mg and 0.01 mg, between 0.01 mg and 0.1 mg, between 0.1 mg and 1 mg, between 1 mg and 3 mg, between 3 mg and 10 mg, between 10 mg and 30 mg, between 30 mg and 100 mg, between 100 mg and 300 mg, between 300 mg and 1,000 mg, or between 1 g and 10 g, inclusive, of a compound described in this application. In certain embodiments, a dose described in this application includes independently between 1 mg and 3 mg, inclusive, of a compound described in this application. In certain embodiments, a dose described in this application includes independently between 3 mg and 10 mg, inclusive, of a compound described in this application. In certain embodiments, a dose described in this application includes independently between 10 mg and 30 mg, inclusive, of a compound described in this application. In certain embodiments, a dose described in this application includes independently between 30 mg and 100 mg, inclusive, of a compound described in this application.

[0545] Dose ranges as described in this application provide guidance for the administration of provided pharmaceutical compositions to an adult. The amount to be administered to, for example, a child or an adolescent can be determined by a medical practitioner or person skilled in the art and can be lower or the same as that administered to an adult.

[0546] A compound or composition, as described in this application, can be administered in combination with one or more additional pharmaceutical agents (e.g., therapeutically and/or prophylactically active agents). The compounds or compositions can be administered in combination with additional pharmaceutical agents that improve their activity, improve bioavailability, improve safety, reduce drug resistance, reduce and/or modify metabolism, inhibit excretion, and/or modify distribution in a subject or cell. It will also be appreciated that the therapy employed may achieve a desired effect for the same disorder, and/or it may achieve different effects. In certain embodiments, a pharmaceutical composition described in this application including a compound described in this application and an additional pharmaceutical agent shows a synergistic effect that is absent in a pharmaceutical composition including one of the compound and the additional pharmaceutical agent, but not both.

[0547] The compound or composition can be administered concurrently with, prior to, or subsequent to one or more additional pharmaceutical agents, which may be useful as, e.g., combination therapies. Pharmaceutical agents include therapeutically active agents. Pharmaceutical agents also include prophylactically active agents. Pharmaceutical agents include small organic molecules such as drug compounds (e.g., compounds approved for human or veterinary use by the U.S. Food and Drug Administration as provided in the Code of Federal Regulations (CFR)), peptides, proteins, carbohydrates, monosaccharides, oligosaccharides, polysaccharides, nucleoproteins, mucoproteins, lipoproteins, synthetic polypeptides or proteins, small molecules linked to proteins, glycoproteins, steroids, nucleic acids, DNAs, RNAs, nucleotides, nucleosides, oligonucleotides, antisense oligonucleotides, lipids, hormones, vitamins, and cells. In certain embodiments, the additional pharmaceutical agent is a pharmaceutical agent useful for treating and/or preventing a disease (e.g., proliferative disease, neurological disease, painful condition, psychiatric disorder, or metabolic disorder). Each additional pharmaceutical agent may be administered at a dose and/or on a time schedule determined for that pharmaceutical agent. The additional pharmaceutical agents may also be administered together with each other and/or with the compound or composition described in this application in a single dose or administered separately in different doses. The particular combination to employ in a regimen will take into account compatibility of the compound described in this application with the additional pharmaceutical agent(s) and/or the desired therapeutic and/or prophylactic effect to be achieved. In general, it is expected that the additional pharmaceutical agent(s) in combination be utilized at levels that do not exceed the levels at which they are utilized individually. In some embodiments, the levels utilized in combination will be lower than those utilized individually.

[0548] In some embodiments, one or more of the compositions described in this application are administered to a subject. In certain embodiments, the subject is an animal. The animal may be of either sex and may be at any stage of development. In certain embodiments, the subject is a human. In other embodiments, the subject is a non-human animal. In certain embodiments, the subject is a mammal. In certain embodiments, the subject is a non-human mammal. In certain embodiments, the subject is a domesticated animal, such as a dog, cat, cow, pig, horse, sheep, or goat. In certain embodiments, the subject is a companion animal, such as a dog or cat. In certain embodiments, the subject is a livestock animal, such as a cow, pig, horse, sheep, or goat. In certain embodiments, the subject is a zoo animal. In another embodiment, the subject is a research animal, such as a rodent (e.g., mouse, rat), dog, pig, or non-human primate.

[0549] Also encompassed by the disclosure are kits (e.g., pharmaceutical packs). The kits provided may comprise a composition, such as a pharmaceutical composition, or a compound described in this application and a container (e.g., a vial, ampule, bottle, syringe, and/or dispenser package, or other suitable container). In some embodiments, provided kits may optionally further include a second container comprising a pharmaceutical excipient for dilution or suspension of a pharmaceutical composition or compound described in this application. In some embodiments, the pharmaceutical composition or compound described in this application provided in the first container and the second container a combined to form one unit dosage form.

[0550] Thus, in one aspect, provided are kits including a first container comprising a compound or composition described in this application. In certain embodiments, the kits are useful for treating a disease in a subject in need thereof. In certain embodiments, the kits are useful for preventing a disease in a subject in need thereof. In certain embodiments, the kits are useful for reducing the risk of developing a disease in a subject in need thereof.

[0551] In certain embodiments, a kit described in this application further includes instructions for using the kit. A kit described in this application may also include information as required by a regulatory agency such as the U.S. Food and Drug Administration (FDA). In certain embodiments, the information included in the kits is prescribing information. In certain embodiments, the kits and instructions provide for treating a disease in a subject in need thereof. In certain embodiments, the kits and instructions provide for preventing a disease in a subject in need thereof. In certain embodiments, the kits and instructions provide for reducing the risk of developing a disease in a subject in need thereof. A kit described in this application may include one or more additional pharmaceutical agents described in this application as a separate composition.

[0552] In some embodiments, the compositions include consumer product, such as comestible, cosmetic, toiletry, potable, inhalable, and wellness products. Exemplary consumer products include salves, waxes, powdered concentrates, pastes, extracts, tinctures, powders, oils, capsules, skin patches, sublingual oral dose drops, mucous membrane oral spray doses, makeup, perfume, shampoos, cosmetic soaps, cosmetic creams, skin lotions, aromatic essential oils, massage oils, shaving preparations, oils for toiletry purposes, lip balm, cosmetic oils, facial washes, moisturizing creams, moisturizing body lotions, moisturizing face lotions, bath salts, bath gels, bath soaps in liquid form, shower gels, bath bombs, hair care preparations, shampoos, conditioner, chocolate bars, brownies, chocolates, cookies, crackers, cakes, cupcakes, puddings, honey, chocolate confections, frozen confections, fruit-based confectionery, sugar confectionery, gummy candies, dragées, pastries, cereal bars, chocolate, cereal based energy bars, candy, ice cream, tea-based beverages, coffee-based beverages, and herbal infusions.

[0553] The present invention is further illustrated by the following Examples, which in no way should be construed as limiting. The entire contents of all of the references (including literature references, issued patents, published patent applications, and co-pending patent applications) cited throughout this application are hereby expressly incorporated by reference. If a reference incorporated in this application contains a term whose definition is incongruous or incompatible with the definition of same term as defined in the present disclosure, the meaning ascribed to the term in this disclosure shall govern. However, mention of any reference, article, publication, patent, patent publication, and patent application cited in this disclosure is not, and should not be taken as an acknowledgment or any form of suggestion that they constitute valid prior art or form part of the common general knowledge in any country in the world.

### EXAMPLES

### Example 1: Primary Screen to Identify Functional Expression of Aromatic Prenyltransferases

[0554] Seven cannabigerolic acid synthase (CBGAS) genes have previously been identified in C. sativa: the prenyltransferases (PTs) CsPT1-7. These enzymes catalyze the C-alkylation by geranyl pyrophosphate of olivetolic acid (OA) to cannabigerolic acid (CBGA). It has previously been reported that it is difficult to express C. sativa PTs in S. cerevisiae; for example, out of CsPT1-7, only CsPT4 was reported to produce CBGA when expressed heterologously in S. cerevisiae, and only at low titers (Luo et al. Nature, 2019).

[0555] To identify additional PT proteins that could be functionally expressed in host cells, a protein engineering library of approximately 1074 proteins was designed using four different strategies: (1) point mutations based on bioinformatics analysis of CsPT sequences; (2) CsPT active-site saturation mutagenesis; (3) CsPT chimeras comprising portions of different CsPT sequences; and (4) protein fusions involving CsPTs and the farnesyl pyrophosphate synthase encoded by ERG20.

[0556] (1) Bioinformatics: bioinformatics analysis was used to predict the fitness of the native amino acid at every position in a CsPT4 protein sequence (SEQ ID NO; 5) and to suggest favorable alternatives if the native amino acid was suboptimal. This analysis produced a total of 281 protein sequences with single amino acid mutations. FIG. 5A depicts the structure of CsPT4 with regions spread throughout the sequence (shown in black) where point mutations were generated based on bioinformatics analysis.

[0557] (2) Active-site saturation mutagenesis: Based on structural modeling, 34 non-essential residue positions within 7 angstroms of the two Mg2+ ion positions or the non-hydrogen GPP substrate atom positions were identified and selected for saturation mutagenesis. This resulted in a total of 646 point mutations, including mutations at the following positions relative to SEQ ID NO: 5: V39, M43, F80, N81, F83, A84, A85, I86, M87, Q89, Y91, I95, L103, F145, G146, I147, F148, A149, F151, S154, R159, I170, T171, I172, S173, S174, H175, A215, K218, D219, I223, G225, V231, T233. FIG. 5B depicts the structure of CsPT4 with regions near the active site (shown in black) where point mutations were focused using this approach.

[0558] (3) Chimeras: chimeric proteins were generated from CsPT1-7 using cross-over points identified from sequence alignments between the CsPT proteins. The chimeras generated had nine presumed transmembrane helices and utilized two different cross-over design strategies: (A) “within membrane” CsPT chimeras with 9 cross-over points on each of nine presumed transmembrane helices (FIG. 7A); and (B) “through membrane chimeras” with a single cross-over point between helices 6&7 or 7&8 (FIG. 7B). In total, 54 “within membrane” and 36 “through membrane” chimeras were generated.

[0559] (4) CsPT fusion proteins: fusion proteins were constructed in which truncated versions of CsPTs were fused at their amino terminus to either ERG20 containing the point mutations F96W and N127W (ERG20ww; SEQ ID NO: 103), or to a GFP control protein. 7 different linkers of varying lengths and sequences were used in combination with 3 truncated versions of CsPTs. 42 proteins were generated using this design strategy.

[0560] Protein sequences were recoded in silico for expression in S. cerevisiae and synthesized in the replicative yeast expression vector shown in FIG. 8. Each enzyme expression construct was transformed into an S. cerevisiae CEN.PK strain that was engineered to overproduce GPP. Transformants were selected based on ability to grow on media lacking uracil. Strain t459830, comprising a fluorescent protein (GFP), was included in the library screen as a negative control for enzyme activity. Strain t460439, comprising a truncated C saliva CsPT4 protein (SEQ ID NO:5) was included in the library as a positive control and was used to establish hit ranking.

[0561] The full set of PT enzymes was assayed for activity in a primary screen using a prenyltransferase assay which was conducted as follows: each thawed glycerol stock of PT transformants was stamped into a well of synthetic complete media minus uracil (SC-URA)+4% dextrose media. Samples were incubated at 30° C. in a shaking incubator for 2 days. A portion of each of the resulting cultures was stamped into a well of SC-URA+2% raffinose+2% galactose+1 mM olivetolic acid (C6). Samples were incubated at 30° C. and shaken in a shaking incubator for 4 days. A portion of each of the resulting production cultures was stamped into a well of phosphate buffered saline (PBS). Optical measurements were taken on a plate reader, with absorbance measured at 600 nm and fluorescence at 528 nm with 485 nm excitation. A portion of each of the production cultures was stamped into a well of 100% methanol in half-height deepwell plates. Plates were heat sealed and frozen. Samples were then thawed for 30 min and spun down at 4° C. A portion of the supernatant was stamped into half-area 96 well plates. CBGA production in the samples was measured via liquid chromatography-mass spectrometry (LC-MS) by measuring relative peak areas. CBGA production was quantified in μg/L by comparing LC/MS peak areas to a standard curve for CBGA.

[0562] The strains were tested for CBGA production by feeding OA to clonal expression cultures. LC-MS analysis revealed that 612 (57%) of library PTs produced measurable amounts of CBGA, and 138 (12.8%) of PTs produced CBGA concentrations comparable to or greater than the positive control strain. Importantly, 5% of the library PTs generated at least 30% more CBGA than the positive control strain, representing a significant improvement of CBGA production.

### Example 2: Secondary Screen to Confirm Functional Expression of Aromatic Prenyltransferases

[0563] To confirm the activity of the candidate PTs identified in Example 1, a secondary screen was performed. One hundred fifty of the candidate PTs from the primary screen described in Example 1 were subjected to the secondary screen to verify and further quantify cannabinoid production.

[0564] In addition to screening for activity on olivetolic acid (C6), a parallel experiment was performed to screen the set of enzymes tested in the secondary screen on the C4 substrate divaric acid (DA), by substituting 1 mM divaric acid for the 1 mM olivetolic acid (OA) in the prenyltransferase assay described in Example 1. The resulting products, CBGA and cannabigerovarinic acid (CBGVA), were quantified in μg/L by comparing LC-MS peak areas to the respective standard curve for CBGA and CBGVA. See, Example 1. The experimental protocols for the secondary screen were the same as the assays used in primary screen described in Example 1 except that both CBGA and CBGVA production were measured using LC-MS on four biological replicates incubated with OA or DA, respectively.

[0565] Strain t444525, comprising a fluorescent protein (GFP), was included in the library screen as a negative control for enzyme activity. Strain t444508, comprising a truncated C. sativa CsPT4 protein (SEQ ID NO: 5), was included in the library as a positive control and was used to establish hit ranking. Table 5 and FIGS. 9A-9d show the results of the secondary screen, in which enhanced cannabinoid production by PT variants was confirmed. The overall trends in PT activity observed in the secondary screen were consistent with the primary screen results. The distribution of CBGA and CBGVA production by library PTs was 1×-3× the activity of the CsPT4 positive control. Sequence information for strains in Table 5 comprising CsPT chimeras or fusions is provided in Table 13.

TABLE 5
Secondary screening activity data in S. cerevisiae
of PT library members described in Example 2

| | | | Standard | | Standard | | |
|---|---|---|---|---|---|---|---|
| | | Average | Deviation | Average | Deviation | | |
| | Strain | CBGA | CBGA | CBGVA | CBGVA | PT | |
| Strain | type | [μg/L] | [μg/L] | [μg/L] | [μg/L] | type | Mutation |
| t444508 | Positive | 3461.9 | 983.5 | 10321 | 1292.2 | Truncated | N/A |
| | control | | | | | CsPT4 | |
| t444525 | Negative | 30 | 64.1 | 6.5 | 14 | N/A | N/A |
| | control | | | | | | |
| t523578 | Library | 2665.5 | 484.7 | 3012.7 | 217.9 | chimera | N/A |
| t523602 | Library | 2501 | 676.2 | 2474.3 | 301.1 | chimera | N/A |
| t523722 | Library | 36.4 | 51.5 | 0 | 0 | chimera | N/A |
| t523777 | Library | 4684.7 | 635.3 | 680 | 83.9 | chimera | N/A |
| t523834 | Library | 4947.9 | 673.7 | 6087.2 | 2171.4 | chimera | N/A |
| t524736 | Library | 4397.6 | 678.9 | 6153.8 | 266.7 | chimera | N/A |
| t524816 | Library | 5149.2 | 699.4 | 2787.8 | 224.9 | chimera | N/A |
| t524866 | Library | 5286.2 | 2344.9 | 4084.8 | 2094.3 | chimera | N/A |
| t525864 | Library | 5654.6 | 291.6 | 8074 | 786 | chimera | N/A |
| t526650 | Library | 8824 | 1709.4 | 2748.5 | 227.6 | chimera | N/A |
| t526890 | Library | 3638.9 | 383.4 | 2809.4 | 175 | chimera | N/A |
| t526897 | Library | 4436.8 | 754 | 892.8 | 88 | chimera | N/A |
| t524521 | Library | 12191 | 321.3 | 26078.6 | 430.2 | fusion | N/A |
| t524649 | Library | 13070.7 | 1343.3 | 28480.3 | 2785.4 | fusion | N/A |
| t524722 | Library | 12636.2 | 1186.7 | 23994.2 | 3433.9 | fusion | N/A |
| t524730 | Library | 10994.5 | 753.9 | 21835 | 1015.3 | fusion | N/A |
| t524834 | Library | 14752.4 | 966 | 24313.7 | 1597.1 | fusion | N/A |
| t524842 | Library | 16251.5 | 3014.7 | 20941 | 1394.5 | fusion | N/A |
| t526009 | Library | 10114.8 | 1484 | 22259.7 | 6608.3 | fusion | N/A |
| t526811 | Library | 17124.9 | 4810.4 | 23525.9 | 4022.2 | fusion | N/A |
| t526843 | Library | 15033.7 | 749.6 | 23436.1 | 2612.2 | fusion | N/A |
| t526923 | Library | 17738.8 | 1649.1 | 23641.1 | 1574.2 | fusion | N/A |
| t526955 | Library | 14907.8 | 1537.6 | 21203.8 | 1082.6 | fusion | N/A |
| t523658 | Library | 581.4 | 164.3 | 128.2 | 43.9 | Point mutant | Y91L |
| | | | | | | (active site | |
| | | | | | | saturation | |
| | | | | | | mutation) | |
| t523737 | Library | 5014.2 | 1348.8 | 6322.3 | 559.8 | Point mutant | I263A |
| | | | | | | (bioinformatics) | |
| t523745 | Library | 3575.7 | 622.1 | 9887.9 | 547.7 | Point mutant | I86T |
| | | | | | | (active site | |
| | | | | | | saturation | |
| | | | | | | mutation) | |
| t523776 | Library | 6761.4 | 1376.4 | 8723.9 | 461.7 | Point mutant | E113R |
| | | | | | | (bioinformatics) | |
| t523786 | Library | 7552.2 | 499.1 | 5122.3 | 405.8 | Point mutant | F148S |
| | | | | | | (active site | |
| | | | | | | saturation | |
| | | | | | | mutation) | |
| t523810 | Library | 5041.5 | 594.6 | 6293.5 | 367 | Point mutant | F151M |
| | | | | | | (active site | |
| | | | | | | saturation | |
| | | | | | | mutation) | |
| t523817 | Library | 9706.6 | 822.9 | 12770.2 | 1301.3 | Point mutant | I86A |
| | | | | | | (active site | |
| | | | | | | saturation | |
| | | | | | | mutation) | |
| t523824 | Library | 5500.3 | 1052.1 | 12171.1 | 2151.2 | Point mutant | I86G |
| | | | | | | (active site | |
| | | | | | | saturation | |
| | | | | | | mutation) | |
| t523857 | Library | 5976.2 | 1170.2 | 12278 | 494.6 | Point mutant | L311R |
| | | | | | | (bioinformatics) | |
| t523882 | Library | 3786.1 | 1373.2 | 7576.8 | 2504.1 | Point mutant | M67L |
| | | | | | | (bioinformatics) | |
| t523914 | Library | 2960.6 | 538.7 | 8548.2 | 1009.3 | Point mutant | M67I |
| | | | | | | (bioinformatics) | |
| t524122 | Library | 4656.8 | 1215.4 | 4208.6 | 1064.7 | Point mutant | K41V |
| | | | | | | (bioinformatics) | |
| t524161 | Library | 5759.6 | 569.5 | 5392.8 | 734.7 | Point mutant | V231M |
| | | | | | | (active site | |
| | | | | | | saturation | |
| | | | | | | mutation) | |
| t524208 | Library | 7376.5 | 1263.4 | 8158.5 | 487.9 | Point mutant | F145S |
| | | | | | | (active site | |
| | | | | | | saturation | |
| | | | | | | mutation) | |
| t524217 | Library | 5611.4 | 874.5 | 4839.6 | 762.7 | Point mutant | F151G |
| | | | | | | (active site | |
| | | | | | | saturation | |
| | | | | | | mutation) | |
| t524232 | Library | 5349.7 | 407.5 | 7765.5 | 2138.6 | Point mutant | A149C |
| | | | | | | (active site | |
| | | | | | | saturation | |
| | | | | | | mutation) | |
| t524248 | Library | 5676.7 | 653.9 | 3910.5 | 296.8 | Point mutant | K41I |
| | | | | | | (bioinformatics) | |
| t524280 | Library | 6950.2 | 1147.2 | 8409.8 | 1593.8 | Point mutant | I46A |
| | | | | | | (bioinformatics) | |
| t524288 | Library | 6649.5 | 406.4 | 10055.1 | 733.8 | Point mutant | F145I |
| | | | | | | (active site | |
| | | | | | | saturation | |
| | | | | | | mutation) | |
| t524297 | Library | 5003.2 | 318.8 | 4194.4 | 825.4 | Point mutant | A215Y |
| | | | | | | (active site | |
| | | | | | | saturation | |
| | | | | | | mutation) | |
| t524322 | Library | 5974.3 | 752.8 | 6794.2 | 1626.4 | Point mutant | S174T |
| | | | | | | (active site | |
| | | | | | | saturation | |
| | | | | | | mutation) | |
| t524344 | Library | 6157.4 | 342.3 | 8670.2 | 1921.5 | Point mutant | F145C |
| | | | | | | (active site | |
| | | | | | | saturation | |
| | | | | | | mutation) | |
| t524352 | Library | 5560.2 | 1403.5 | 3449.3 | 852 | Point mutant | A47V |
| | | | | | | (bioinformatics) | |
| t524384 | Library | 4401.5 | 1110.6 | 9762.1 | 1163 | Point mutant | F56L |
| | | | | | | (bioinformatics) | |
| t524385 | Library | 6113 | 378.3 | 10237.2 | 1371.3 | Point mutant | M43V |
| | | | | | | (active site | |
| | | | | | | saturation | |
| | | | | | | mutation) | |
| t524466 | Library | 5566.6 | 371.2 | 7709.8 | 1472.6 | Point mutant | F145V |
| | | | | | | (active site | |
| | | | | | | saturation | |
| | | | | | | mutation) | |
| t524505 | Library | 7714.5 | 1410 | 10760.5 | 285.8 | Point mutant | F145L |
| | | | | | | (active site | |
| | | | | | | saturation | |
| | | | | | | mutation) | |
| t524512 | Library | 7118.9 | 537.2 | 8080.4 | 742.4 | Point mutant | I46G |
| | | | | | | (bioinformatics) | |
| t524536 | Library | 5833.3 | 545.4 | 7849.2 | 968.5 | Point mutant | I46C |
| | | | | | | (bioinformatics) | |
| t524570 | Library | 6721.6 | 759.7 | 8312.4 | 300.2 | Point mutant | S260L |
| | | | | | | (bioinformatics) | |
| t524592 | Library | 6785.2 | 1486.3 | 7637.1 | 743.1 | Point mutant | F318L |
| | | | | | | (bioinformatics) | |
| t524602 | Library | 7249.6 | 731 | 3926.3 | 193.4 | Point mutant | M210Y |
| | | | | | | (bioinformatics) | |
| t524625 | Library | 7070.6 | 946.2 | 8199.6 | 703.6 | Point mutant | V140L |
| | | | | | | (bioinformatics) | |
| t524672 | Library | 6864.9 | 2041.6 | 5207.9 | 427.9 | Point mutant | T244A |
| | | | | | | (bioinformatics) | |
| t524674 | Library | 8432.6 | 650.6 | 7172 | 839 | Point mutant | M87T |
| | | | | | | (active site | |
| | | | | | | saturation | |
| | | | | | | mutation) | |
| t524704 | Library | 6438.5 | 643.6 | 8372.3 | 1913.7 | Point mutant | F145M |
| | | | | | | (active site | |
| | | | | | | saturation | |
| | | | | | | mutation) | |
| t524753 | Library | 5693.3 | 784.2 | 6806.7 | 461.6 | Point mutant | I261A |
| | | | | | | (bioinformatics) | |
| t524761 | Library | 4545.9 | 337.3 | 5722.9 | 289.7 | Point mutant | A136P |
| | | | | | | (bioinformatics) | |
| t524833 | Library | 4375.3 | 530.2 | 3735.2 | 242.8 | Point mutant | F216I |
| | | | | | | (bioinformatics) | |
| t524850 | Library | 8769.6 | 598.6 | 9914 | 1449.5 | Point mutant | T187R |
| | | | | | | (bioinformatics) | |
| t524858 | Library | 3329.1 | 3025.4 | 4902.7 | 373.6 | Point mutant | R197I |
| | | | | | | (bioinformatics) | |
| t524865 | Library | 6270.3 | 533.6 | 8091 | 496.5 | Point mutant | S232R |
| | | | | | | (bioinformatics) | |
| t524874 | Library | 10900.2 | 1462.7 | 11423.9 | 438.6 | Point mutant | L311N |
| | | | | | | (bioinformatics) | |
| t524882 | Library | 5548.2 | 223.6 | 6976.9 | 263 | Point mutant | I142A |
| | | | | | | (bioinformatics) | |
| t525585 | Library | 2194.3 | 587.3 | 2162.1 | 253.8 | Point mutant | F151H |
| | | | | | | (active site | |
| | | | | | | saturation | |
| | | | | | | mutation) | |
| t525616 | Library | 3725.2 | 596.9 | 10220.5 | 1444.9 | Point mutant | S260V |
| | | | | | | (bioinformatics) | |
| t525676 | Library | 3517.7 | 1279.8 | 7602.7 | 2311.7 | Point mutant | S277G |
| | | | | | | (bioinformatics) | |
| t525690 | Library | 5645.1 | 1180.8 | 8380 | 2217.9 | Point mutant | C284L |
| | | | | | | (bioinformatics) | |
| t525713 | Library | 2656.1 | 864.1 | 3887.3 | 544.4 | Point mutant | F72E |
| | | | | | | (bioinformatics) | |
| t525728 | Library | 3323.2 | 1322.5 | 7698.3 | 2661.5 | Point mutant | A136S |
| | | | | | | (bioinformatics) | |
| t525736 | Library | 5208.9 | 2127.4 | 6829.9 | 1066.7 | Point mutant | A199S |
| | | | | | | (bioinformatics) | |
| t525740 | Library | 4431.1 | 2017.7 | 9006.1 | 1042.2 | Point mutant | F141L |
| | | | | | | (bioinformatics) | |
| t525756 | Library | 3452.8 | 1541.9 | 10239.1 | 1007.3 | Point mutant | N272S |
| | | | | | | (bioinformatics) | |
| t525760 | Library | 4323.4 | 1352.3 | 8042.5 | 687.1 | Point mutant | I142L |
| | | | | | | (bioinformatics) | |
| t525762 | Library | 4946.6 | 1411.6 | 7340.7 | 1739.2 | Point mutant | S184Y |
| | | | | | | (bioinformatics) | |
| t525772 | Library | 4346.7 | 1650.5 | 6881.7 | 2472.2 | Point mutant | R197A |
| | | | | | | (bioinformatics) | |
| t525780 | Library | 5828.8 | 904.2 | 9645.6 | 2009 | Point mutant | I273F |
| | | | | | | (bioinformatics) | |
| t525796 | Library | 4835.2 | 1544.9 | 9575.7 | 1467.7 | Point mutant | S184L |
| | | | | | | (bioinformatics) | |
| t525816 | Library | 5418.3 | 655.4 | 7561.8 | 835.9 | Point mutant | H29D |
| | | | | | | (bioinformatics) | |
| t525817 | Library | 21.1 | 17.8 | 3.3 | 6.6 | Point mutant | V39M |
| | | | | | | (active site | |
| | | | | | | saturation | |
| | | | | | | mutation) | |
| t525828 | Library | 5123.7 | 1636.2 | 7572.8 | 2484.3 | Point mutant | P301D |
| | | | | | | (bioinformatics) | |
| t525850 | Library | 3870.3 | 1445.4 | 7035.8 | 905.8 | Point mutant | T289A |
| | | | | | | (bioinformatics) | |
| t525856 | Library | 4873 | 1306.6 | 7188.6 | 1054.9 | Point mutant | S260A |
| | | | | | | (bioinformatics) | |
| t525858 | Library | 5477 | 824.5 | 8331.8 | 429.7 | Point mutant | S260I |
| | | | | | | (bioinformatics) | |
| t525860 | Library | 6912.5 | 1058.8 | 8313.3 | 367.4 | Point mutant | Q267F |
| | | | | | | (bioinformatics) | |
| t525884 | Library | 4732.5 | 941.4 | 5663.6 | 460.6 | Point mutant | H60E |
| | | | | | | (bioinformatics) | |
| t525906 | Library | 5123.2 | 311.3 | 1959.2 | 200.6 | Point mutant | I86F |
| | | | | | | (active site | |
| | | | | | | saturation | |
| | | | | | | mutation) | |
| t525907 | Library | 6191.8 | 424.9 | 8313.5 | 439.8 | Point mutant | F148A |
| | | | | | | (active site | |
| | | | | | | saturation | |
| | | | | | | mutation) | |
| t525908 | Library | 6029 | 624 | 6313.8 | 390.1 | Point mutant | H60D |
| | | | | | | (bioinformatics) | |
| t525916 | Library | 2587.7 | 2992 | 3579.4 | 4145.6 | Point mutant | W68G |
| | | | | | | (bioinformatics) | |
| t525944 | Library | 5577.7 | 691.6 | 6473.7 | 1256 | Point mutant | P301G |
| | | | | | | (bioinformatics) | |
| t525970 | Library | 4480.7 | 170.7 | 6418.1 | 380.5 | Point mutant | A298D |
| | | | | | | (bioinformatics) | |
| t526011 | Library | 5297 | 875.5 | 8787.5 | 808.7 | Point mutant | M110I |
| | | | | | | (bioinformatics) | |
| t526144 | Library | 4225.9 | 1579.2 | 7396.6 | 425.3 | Point mutant | I170T |
| | | | | | | (active site | |
| | | | | | | saturation | |
| | | | | | | mutation) | |
| t526242 | Library | 7393.2 | 1897.7 | 4855.7 | 136.2 | Point mutant | A149E |
| | | | | | | (active site | |
| | | | | | | saturation | |
| | | | | | | mutation) | |
| t526248 | Library | 5767.3 | 1310.6 | 6229.4 | 315.3 | Point mutant | F56T |
| | | | | | | (bioinformatics) | |
| t526250 | Library | 6951.8 | 953 | 4091.3 | 442.2 | Point mutant | V231L |
| | | | | | | (active site | |
| | | | | | | saturation | |
| | | | | | | mutation) | |
| t526252 | Library | 6551.9 | 798.7 | 5670.5 | 316.9 | Point mutant | I223V |
| | | | | | | (active site | |
| | | | | | | saturation | |
| | | | | | | mutation) | |
| t526258 | Library | 6785.2 | 630.9 | 9360.3 | 475.5 | Point mutant | D94E |
| | | | | | | (bioinformatics) | |
| t526260 | Library | 6623.6 | 739 | 9160.7 | 762.1 | Point mutant | F82G |
| | | | | | | (bioinformatics) | |
| t526336 | Library | 6929.2 | 677.4 | 9616.6 | 742.4 | Point mutant | F145T |
| | | | | | | (active site | |
| | | | | | | saturation | |
| | | | | | | mutation) | |
| t526340 | Library | 5645.7 | 466.5 | 9840.5 | 409.9 | Point mutant | C48T |
| | | | | | | (bioinformatics) | |
| t526347 | Library | 5451.1 | 1007.1 | 6698.2 | 465.5 | Point mutant | A149W |
| | | | | | | (active site | |
| | | | | | | saturation | |
| | | | | | | mutation) | |
| t526392 | Library | 5461 | 265.2 | 7818.9 | 2425.7 | Point mutant | F80W |
| | | | | | | (active site | |
| | | | | | | saturation | |
| | | | | | | mutation) | |
| t526393 | Library | 5085.9 | 445.2 | 3980.5 | 517.8 | Point mutant | I170C |
| | | | | | | (active site | |
| | | | | | | saturation | |
| | | | | | | mutation) | |
| t526411 | Library | 5539.3 | 1070.7 | 3555.4 | 1000.9 | Point mutant | S173W |
| | | | | | | (active site | |
| | | | | | | saturation | |
| | | | | | | mutation) | |
| t526424 | Library | 4290.5 | 429.6 | 5715.1 | 204.6 | Point mutant | A149I |
| | | | | | | (active site | |
| | | | | | | saturation | |
| | | | | | | mutation) | |
| t526428 | Library | 5254.1 | 393.3 | 2456.2 | 202.5 | Point mutant | A149Q |
| | | | | | | (active site | |
| | | | | | | saturation | |
| | | | | | | mutation) | |
| t526432 | Library | 5261.9 | 1093.5 | 6209.1 | 965.5 | Point mutant | A149S |
| | | | | | | (active site | |
| | | | | | | saturation | |
| | | | | | | mutation) | |
| t526436 | Library | 5011.6 | 709.5 | 5627.4 | 381.6 | Point mutant | F151T |
| | | | | | | (active site | |
| | | | | | | saturation | |
| | | | | | | mutation) | |
| t526449 | Library | 3334.1 | 366.1 | 4227.2 | 847.4 | Point mutant | R59P |
| | | | | | | (bioinformatics) | |
| t526450 | Library | 4724.1 | 677.4 | 3752.6 | 755.5 | Point mutant | M43A |
| | | | | | | (active site | |
| | | | | | | saturation | |
| | | | | | | mutation) | |
| t526546 | Library | 5046.3 | 751 | 7661.5 | 786.7 | Point mutant | F151I |
| | | | | | | (active site | |
| | | | | | | saturation | |
| | | | | | | mutation) | |
| t526556 | Library | 6262.2 | 272.7 | 5905.4 | 1006 | Point mutant | A149T |
| | | | | | | (active site | |
| | | | | | | saturation | |
| | | | | | | mutation) | |
| t526569 | Library | 5246 | 774.7 | 8236.7 | 1049.6 | Point mutant | F56I |
| | | | | | | (bioinformatics) | |
| t526570 | Library | 6322.3 | 639.4 | 6961.2 | 1204.4 | Point mutant | F151C |
| | | | | | | (active site | |
| | | | | | | saturation | |
| | | | | | | mutation) | |
| t526577 | Library | 5820.3 | 599.3 | 7267.5 | 1042.4 | Point mutant | G52L |
| | | | | | | (bioinformatics) | |
| t526600 | Library | 6083.7 | 934.8 | 6850.2 | 622.7 | Point mutant | S173G |
| | | | | | | (active site | |
| | | | | | | saturation | |
| | | | | | | mutation) | |
| t526633 | Library | 8746.7 | 721.4 | 10086.8 | 688.3 | Point mutant | I147L |
| | | | | | | (active site | |
| | | | | | | saturation | |
| | | | | | | mutation) | |
| t526675 | Library | 4852.1 | 1022.5 | 8613.9 | 484 | Point mutant | S232K |
| | | | | | | (bioinformatics) | |
| t526691 | Library | 6718 | 1009.4 | 9191 | 1.845.5 | Point mutant | F83Y |
| | | | | | | (active site | |
| | | | | | | saturation | |
| | | | | | | mutation) | |
| t526755 | Library | 5185.5 | 257.5 | 4298.8 | 396.3 | Point mutant | P30IT |
| | | | | | | (bioinformatics) | |
| t526763 | Library | 5805.3 | 822.1 | 7985 | 1141.8 | Point mutant | M87I |
| | | | | | | (active site | |
| | | | | | | saturation | |
| | | | | | | mutation) | |
| t526771 | Library | 9529.4 | 1147.9 | 11951.3 | 991.4 | Point mutant | I86V |
| | | | | | | (active site | |
| | | | | | | saturation | |
| | | | | | | mutation) | |
| t526779 | Library | 4687.5 | 938.5 | 7077.4 | 1654.1 | Point mutant | I86C |
| | | | | | | (active site | |
| | | | | | | saturation | |
| | | | | | | mutation) | |
| t526785 | Library | 7110.2 | 692.7 | 10615.9 | 771.7 | Point mutant | Q288R |
| | | | | | | (bioinformatics) | |
| t526804 | Library | 5173.9 | 730.5 | 7101 | 962.9 | Point mutant | I142M |
| | | | | | | (bioinformatics) | |
| t526809 | Library | 8567.5 | 1106.3 | 12813.2 | 474 | Point mutant | M43L |
| | | | | | | (active site | |
| | | | | | | saturation | |
| | | | | | | mutation) | |
| t526825 | Library | 6220.8 | 687.5 | 11910.8 | 1397.8 | Point mutant | L311K |
| | | | | | | (bioinformatics) | |
| t526828 | Library | 6068.2 | 1021.8 | 2292 | 155.8 | Point mutant | S302T |
| | | | | | | (bioinformatics) | |
| t526834 | Library | 5993.4 | 391 | 6244.1 | 438.8 | Point mutant | N167A |
| | | | | | | (bioinformatics) | |
| t526836 | Library | 5301.1 | 381.2 | 5712.1 | 227.7 | Point mutant | M87C |
| | | | | | | (active site | |
| | | | | | | saturation | |
| | | | | | | mutation) | |
| t526842 | Library | 4355.2 | 492.8 | 6387.5 | 434.5 | Point mutant | R197V |
| | | | | | | (bioinformatics) | |
| t526856 | Library | 4088.3 | 1232.7 | 4345.6 | 156.3 | Point mutant | Y163F |
| | | | | | | (bioinformatics) | |
| t526858 | Library | 4854.8 | 667.9 | 4369.3 | 197.2 | Point mutant | M243I |
| | | | | | | (bioinformatics) | |
| t526868 | Library | 4941.4 | 391.9 | 5284.5 | 371.2 | Point mutant | M87Q |
| | | | | | | (active site | |
| | | | | | | saturation | |
| | | | | | | mutation) | |
| t526875 | Library | 5517.1 | 489.7 | 11146.5 | 982.7 | Point mutant | Q162R |
| | | | | | | (bioinformatics) | |
| t526922 | Library | 6205 | 877.3 | 5037.9 | 466 | Point mutant | S258A |
| | | | | | | (bioinformatics) | |
| t526930 | Library | 7072.5 | 605.6 | 8508.1 | 443.3 | Point mutant | F245W |
| | | | | | | (bioinformatics) | |
| t526947 | Library | 5298.9 | 836.5 | 7921.9 | 470.9 | Point mutant | S182L |
| | | | | | | (bioinformatics) | |
| t526953 | Library | 9582.5 | 633.4 | 6273.6 | 1543.5 | Point mutant | C31F |
| | | | | | | (bioinformatics) | |
| t526954 | Library | 8065.6 | 558 | 8036 | 607 | Point mutant | F245R |
| | | | | | | (bioinformatics) | |
| t526956 | Library | 8231.3 | 535 | 9192.8 | 1172.5 | Point mutant | M87V |
| | | | | | | (active site | |
| | | | | | | saturation | |
| | | | | | | mutation) | |
| t526961 | Library | 6025.2 | 552.7 | 7618.5 | 1228.1 | Point mutant | H60N |
| | | | | | | (bioinformatics) | |
| t526964 | Library | 4432.5 | 720 | 6492.5 | 477.5 | Point mutant | Y91F |
| | | | | | | (active site | |
| | | | | | | saturation | |
| | | | | | | mutation) | |
| t526971 | Library | 7446.3 | 559.6 | 6271.5 | 188.3 | Point mutant | I142T |
| | | | | | | (bioinformatics) | |
| t523553 | Library | 7185.8 | 2310.6 | 15527.2 | 1357.6 | Point mutant | I86S |
| | | | | | | (active site | |
| | | | | | | saturation | |
| | | | | | | mutation) | |

[0566] The set of point mutations carried over from the primary screen to the secondary screen included 75 of the 281 point mutations generated using the bioinformatics analysis discussed in Example 1, and 52 of the 646 point mutations generated using the active site saturation-mutagenesis discussed in Example 1. Therefore, the bioinformatics analysis substantially improved hit rate (˜3.4×) for identifying potentially relevant point mutations compared to the exhaustive mutational scan procedure of saturation mutagenesis. Also, by mapping the point mutations onto a homology model for CsPT4, it was found that the mutations identified through bioinformatics analysis were dispersed throughout the protein structure, in contrast to those identified by saturation mutagenesis, which were localized around the active site. This suggested that the bioinformatics analysis could identify mutations at positions that may improve protein stability and expression in addition to catalytic activity.

[0567] Active-site saturation mutagenesis identified multiple point mutations at position 186 in SEQ ID NO: 5 (Table 5). This residue is located in an apposing face of a helix that forms part of the active site of CsPT4. Without wishing to be bound by any theory, substitution mutations at a residue corresponding to position 86 in SEQ ID NO: 5 (e.g., I86S, I86G, I86A) may increase activity of the PT enzyme due to the decreased residue size relative to the corresponding residue in the wildtype protein. Reduction in side-chain volume at this position may lead to a slight shift in the helix, which could increase the volume of the olivetolic/divarinic acid binding pocket. Active-site saturation mutagenesis also identified multiple point mutations at positions F82 (e.g., F82G), F83 (e.g., F83Y), and M87 (e.g., M87T, M87I, M87C. M87Q, and M87V) in SEQ ID NO: 5 (Table 5). Similar to residue 186, residues F83 and M87 are also located in the same apposing face of the helix that forms part of the active site of CsPT4. Additionally, residues F82. F83, and M87 are predicted to interact with residue 186. Without wishing to be bound by any theory, substitutions at residues F82, F83 and M87 may impact activity of the PT enzyme in a similar manner to that discussed above for residue 186. These results suggest that substitution mutations in residues that are not interacting directly with the substrate or cofactor can still lead to modulation of activity of the PT enzyme.

[0568] Variant PTs comprising combinations of these beneficial point mutations may further enhance cannabinoid production. The discovery of many point mutations that substantially improve production of CBGA and CBGVA represents a significant improvement in the development and use of membrane-bound PTs.

[0569] The ERG20-CsPT fusion proteins and the CsPT chimeras assayed in the secondary screen were generally found to produce both CBGA and CBGVA when fed OA and DA, respectively, in the prenyltransferase assay. The fusion proteins were found to generate at least 10000 μg/L CBGA and 20000 μg/L CBGVA in all eleven strains tested (FIGS. 10A and 10B).

[0570] Robust CBGA production was also observed in several of the CsPT chimeras (FIGS. 11A and 11B). Eleven of the twelve chimeras assayed in the secondary screen were found to produce CBGA, with some producing more than 8000 μg/L and 5000 μg/L CBGA (strains t526650; and t525864, 524866 and 524816, respectively; SEQ ID NOs: 119; and 118, 117 and 116). SEQ ID NO: 118 (strain t525864) comprises 85% CsPT4 and 15% CsPT7. SEQ ID NO: 116 (Strain t524816) comprises 64% CsPT4 and 36% CsPT7. SEQ ID NO: 119 (Strain t526650) comprises 83% CsPT4 and 17% CsPT7. SEQ ID NO: 117 (strain t524866) comprises 83% CsPT4 and 17% CsPT6.

[0571] Analysis of CsPT chimera hits using a motif identification software identified multiple sequence motifs that were more likely to be found in chimeras that produce CBGA than in chimeras that did not produce CBGA, with a measure of statistical significance based on E-value (Table 6). Thus, sequence motifs were identified that correlate with enhanced CBGA production in chimeric membrane-bound PTs.

TABLE 6
Non-limiting examples of motifs identified in chimeric PTs

| | | | Start site | End site | |
|---|---|---|---|---|---|
| | | | (relative to | (relative | |
| Sequence Motif | | Sequence | SEQ ID | to SEQ | |
| (SEQ ID NO) | E-value | Length | NO: 5) | ID NO: 5) | Motif Location |
| MTVMGMT | 8.90E−06 | 7 | 207 | 213 | chimeric junction, |
| (SEQ ID NO: 11) | | | | | CsPT4 |
| [EV][LMW][RS]P[SAP]F | 1.10E−02 | 12 | 195 | 206 | chimeric junction, |
| [ST]F[L][IL]AF | | | | | CsPT1, CsPT4, CsPT7 |
| (SEQ ID NO: 12) | | | | | |
| QFFEFIW | 8.90E−06 | 7 | 304 | 310 | chimeric junction, |
| (SEQ ID NO: 13) | | | | | CsPT4 |
| HNTNL | 1.90E−03 | 5 | 57 | 61 | CsPT1, CsPT7 |
| (SEQ ID NO: 14) | | | | | |
| TCWKL | 8.90E−06 | 5 | 30 | 34 | CsPT4, CsPT7 |
| (SEQ ID NO: 15) | | | | | |
| M[IL]LSHAILAFC | 6.30E−03 | 11 | 274 | 284 | chimeric junction, |
| (SEQ ID NO: 16) | | | | | CsPT4 |
| HVG[LV][AN]FT[SCF]Y | 1.30E−04 | 16 | 175 | 190 | chimeric junction, |
| [YS]A[ST][RT][AS]A[LF] | | | | | csPT4 |
| (SEQ ID NO: 17) | | | | | |
| GLIVT | 5.50E−04 | 5 | 126 | 130 | chimeric junction, |
| (SEQ ID NO: 18) | | | | | CsPT4 |
| L[YH]YAEY[LE]V | 4.30E−02 | 8 | 312 | 319 | chimeric junction, |
| (SEQ ID NO: 19) | | | | | CsPT1, CsPT4, CsPT7 |
| KAFFAL | 1.70E−02 | 6 | 69 | 74 | chimeric junction, |
| (SEQ ID NO: 20) | | | | | CsPT4 |
| KLGARNMT | 8.90E−06 | 00 | 237 | 244 | CsPT4 |
| (SEQ ID NO: 21) | | | | | |
| QAF[NK]SN | 2.70E−02 | 6 | 267 | 272 | chimeric junction, |
| (SEQ ID NO: 22) | | | | | CsPT1, CsPT7 |
| LIFQT | 8.90E−06 | 5 | 285 | 289 | chimeric junction, |
| (SEQ ID NO: 23) | | | | | CsPT1, CsPT4, CsPT7 |
| SIIVALT | 8.90E−06 | 7 | 119 | 125 | chimeric junction, |
| (SEQ ID NO: 24) | | | | | CsPT4, CsPT7 |
| MSIETAW | 8.90E−06 | 7 | 110 | 116 | chimeric junction, |
| (SEQ ID NO: 25) | | | | | CsPT4, CsPT7 |
| VVSGV | 8.90E−06 | 5 | 246 | 250 | chimeric junction, |
| (SEQ ID NO: 26) | | | | | CsPT4 |
| RPYVV | 8.90E−06 | 5 | 36 | 40 | chimeric junction, |
| (SEQ ID NO: 27) | | | | | CsPT4 |
| KPDLP | 8.90E−06 | 5 | 100 | 104 | CsPT1, CsPT4, CsPT7 |
| (SEQ ID NO: 28) | | | | | |
| RWKQY | 8.90E−06 | 5 | 159 | 163 | CsPT4 |
| (SEQ ID NO: 29) | | | | | |
| FLITI | 8.90E−06 | 5 | 168 | 172 | chimeric junction, |
| (SEQ ID NO: 30) | | | | | CsPT4 |
| DIEGD | 8.90E−06 | 5 | 222 | 226 | CsPT4, CsPT7 |
| (SEQ ID NO: 31) | | | | | |
| KYGVST | 8.90E−06 | 6 | 228 | 233 | CsPT4 |
| (SEQ ID NO: 32) | | | | | |

### Example 3: Functional Expression of Additional Chimeric PTs

[0572] Multiple chimeras from Examples 1 and 2 (corresponding to strains t526897, t523777, t524736, t523834, t526650, t524816, and t523722) were modified to carry point mutations that were found to be associated with increasing CBGAS activity in Example 1. As shown in Table 7, the following point mutations were tested in the context of chimeras either alone or in combination: C31F, F245R, and S232R, as described in Examples 1 and 2, and F246R and S233R. For the point mutations F246R and S233R, the amino acid numbering corresponds to residue position in the sequence of the parent chimera strain. Strain t612567 comprises the chimera from parent strain t523722 with a F246R substitution. Strain t612571 comprises the chimera from parent strain t523777 with a S233R substitution. The corresponding residues to F246 and S233 in CsPT4 are F245 and S232.

[0573] The standard deviation (SD) values reported in Table 7 were generally higher than the average CBGA values reported for a given strain. Without wishing to be bound by any theory, several factors related to the assay conditions may contribute to causing the high SD values. For example, when calculating the SD of control samples dispersed across multiple plates, qualitatively high SD values may be caused by aggregating error associated with plate-to-plate variability in performance, sample processing during screening, sample processing during analytics, and other factors. These errors compound to generate high dispersion in titer data for these controls and consequently high SD. Another source of high dispersion may be in the occasional sample dropout. For example, if a given strain fails to grow from a glycerol stock when inoculated (e.g., due to an error during liquid transfer of culture into media), but its replicates do, this can create artificially high dispersion in the data.

[0574] The chimeric PTs with point mutations described above were screened for activity in a library (Gen 2 library). Strain t612212, expressing a truncated CsPT4 protein (SEQ 1D NO: 5), was included as a positive control. The assay used to assess CBGAS activity was the same as the assay described in Example 1 except that 1 mM olivetolic acid and 1 mM divaric acid were separately used as substrates in parallel assays, and both CBGA and CBGVA production were measured using LC-MS on three biological replicates. Table 7 and FIGS. 12A-B show the results of the Gen. 2 PT library screen. Sequences of the chimeric fusions are provided in Table 14. Sequences of individual portions of representative chimeric PTs are provided in Table 15.

TABLE 7
Activity data of Gen2 library members in S. cerevisiae

| | Strain type | | | Standard | | Standard |
|---|---|---|---|---|---|---|
| | PT type | Parent | Average | Deviation | Average | Deviation |
| | Mutation (if | chimera | CBGA | CBGA | CBGVA | CBGVA |
| Strain ID | applicable) | strain | [μg/L] | [μg/L] | [μg/L] | [μg/L] |
| t612212 | Positive control | N/A | 12130.94 | 13905.38 | 2882.431 | 3226.651 |
| t612567 | Library | t523777 | 0 | 0 | 0 | 0 |
| | Chimera; F246R | | | | | |
| t612571 | Library | t523777 | 0 | 0 | 0 | 0 |
| | Chimera; S233R | | | | | |
| t612573 | Library | t526897 | 0 | 0 | 0 | 0 |
| | Chimera; C31F | | | | | |
| t612577 | Library | t523777 | 0 | 0 | 0 | 0 |
| | Chimera; C31F | | | | | |
| t612589 | Library | t526897 | 0 | 0 | 0 | 0 |
| | Chimera; F245R | | | | | |
| t612570 | Library | t526897 | 194.8158 | 315.0592 | 0 | 0 |
| | Chimera; S232R | | | | | |
| t612583 | Library | t524736 | 254.0501 | 407.9202 | 0 | 0 |
| | Chimera; C31F | | | | | |
| t612587 | Library | t523834 | 265.0743 | 413.0831 | 0 | 0 |
| | Chimera; F245R | | | | | |
| t612579 | Library | t523834 | 320.3343 | 360.6222 | 0 | 0 |
| | Chimera; C31F | | | | | |
| t612575 | Library | t523834 | 1127.725 | 1239.832 | 0 | 0 |
| | Chimera; S232R | | | | | |
| t612581 | Library | t524736 | 1323.91 | 1450.387 | 0 | 0 |
| | Chimera; F245R | | | | | |
| t612569 | Library | t524736 | 1387.059 | 1790.107 | 0 | 0 |
| | Chimera; S232R | | | | | |
| t612580 | Library | t523722 | 6481.111 | 7153.546 | 246.4287 | 603.6247 |
| | Chimera; C31F | | | | | |
| t612584 | Library | t524816 | 9324.939 | 22841.34 | 4098.149 | 10038.37 |
| | Chimera; C31F | | | | | |
| t612576 | Library | t523722 | 11279.32 | 13450.5 | 6622.208 | 7872.582 |
| | Chimera; S232R | | | | | |
| t612585 | Library | t524816 | 20251.26 | 22878.32 | 19647.84 | 21633.9 |
| | Chimera; F245R | | | | | |
| t612578 | Library | t524816 | 21078.15 | 28541.1 | 18798.61 | 24164.75 |
| | Chimera; C31F; | | | | | |
| | S232R | | | | | |
| t612568 | Library | t526650 | 21935.64 | 24298.67 | 34451.92 | 37874.88 |
| | Chimera; S232R | | | | | |
| t612582 | Library | t526650 | 21964.82 | 24353.01 | 13889.79 | 15321.91 |
| | Chimera; F245R | | | | | |
| t612572 | Library | t524816 | 23763.55 | 26113.94 | 51399.02 | 56871.95 |
| | Chimera; S232R | | | | | |
| t612574 | Library | t526650 | 30387.66 | 34066.63 | 8672.353 | 10046.56 |
| | Chimera; C31F | | | | | |
| t612588 | Library | t524816 | 30551.87 | 33695.77 | 3560.022 | 5094.13 |
| | Chimera; | | | | | |
| | C31F; F245R | | | | | |
| t612586 | Library | t524816 | 32959.86 | 36147.22 | 5985.625 | 9205.13 |
| | Chimera; | | | | | |
| | C31F; F245R; | | | | | |
| | S232R | | | | | |
| t612533 | Library | t523722 | 0 | 0 | 0 | 0 |
| | (Chimeric | | | | | |
| | fusion) | | | | | |
| t612541 | Library | t523722 | 0 | 0 | 0 | 0 |
| | (Chimeric | | | | | |
| | fusion) | | | | | |
| t612553 | Library | t523722 | 0 | 0 | 0 | 0 |
| | (Chimeric | | | | | |
| | fusion) | | | | | |
| t612562 | Library | t523722 | 0 | 0 | 0 | 0 |
| | (Chimeric | | | | | |
| | fusion) | | | | | |
| t612554 | Library | t523722 | 116.9348 | 286.4306 | 0 | 0 |
| | (Chimeric | | | | | |
| | fusion) | | | | | |
| t612545 | Library | t526897 | 10311.92 | 11383.54 | 0 | 0 |
| | (Chimeric | | | | | |
| | fusion) | | | | | |
| t612540 | Library | t526897 | 11429.6 | 13401.96 | 0 | 0 |
| | (Chimeric | | | | | |
| | fusion) | | | | | |
| t612557 | Library | t526897 | 11538.03 | 12971.28 | 0 | 0 |
| | (Chimeric | | | | | |
| | fusion) | | | | | |
| t612560 | Library | t526897 | 12463.34 | 14132.09 | 0 | 0 |
| | (Chimeric | | | | | |
| | fusion) | | | | | |
| t612556 | Library | t523777 | 12620.98 | 13927.45 | 0 | 0 |
| | (Chimeric | | | | | |
| | fusion) | | | | | |
| t612561 | Library | t523777 | 13079.52 | 14441.16 | 0 | 0 |
| | (Chimeric | | | | | |
| | fusion) | | | | | |
| t612551 | Library | t526897 | 13722.02 | 17028.25 | 0 | 0 |
| | (Chimeric | | | | | |
| | fusion) | | | | | |
| t612543 | Library | t523777 | 14500.09 | 16215.38 | 0 | 0 |
| | (Chimeric | | | | | |
| | fusion) | | | | | |
| t612558 | Library | t523777 | 18786.8 | 20659.6 | 375.0181 | 584.81 |
| | (Chimeric | | | | | |
| | fusion) | | | | | |
| t612559 | Library | t523777 | 25827.83 | 28473.21 | 508.7528 | 794.432 |
| | (Chimeric | | | | | |
| | fusion) | | | | | |
| t612538 | Library | t526650 | 41083.81 | 53439.9 | 15215.75 | 16847.43 |
| | (Chimeric | | | | | |
| | fusion) | | | | | |
| t612564 | Library | t523834 | 44532.26 | 49042.75 | 5336.139 | 6681.855 |
| | (Chimeric | | | | | |
| | fusion) | | | | | |
| t612537 | Library | t526650 | 47840.43 | 55578.1 | 4927.458 | 7431.708 |
| | (Chimeric | | | | | |
| | fusion) | | | | | |
| t612565 | Library | t523834 | 48333.47 | 58786.05 | 8663.469 | 10621.93 |
| | (Chimeric | | | | | |
| | fusion) | | | | | |
| t612536 | Library | t524816 | 50281.31 | 65111.86 | 3244.597 | 4443.507 |
| | (Chimeric | | | | | |
| | fusion) | | | | | |
| t612566 | Library | t526650 | 50357.21 | 65226.16 | 6777.715 | 8496.571 |
| | (Chimeric | | | | | |
| | fusion) | | | | | |
| t612547 | Library | t524816 | 53558.28 | 61762.84 | 3049.673 | 3782.629 |
| | (Chimeric | | | | | |
| | fusion) | | | | | |
| t612539 | Library | t524736 | 57572.61 | 63207.54 | 17919.95 | 22103.85 |
| | (Chimeric | | | | | |
| | fusion) | | | | | |
| t612555 | Library | t524816 | 61742.04 | 68165.03 | 5539.507 | 6516.889 |
| | (Chimeric | | | | | |
| | fusion) | | | | | |
| t612563 | Library | t524736 | 63519.61 | 70172.29 | 31992.32 | 35998.68 |
| | (Chimeric | | | | | |
| | fusion) | | | | | |
| t612549 | Library | t524816 | 66007.6 | 76076.68 | 5204.919 | 7052.566 |
| | (Chimeric | | | | | |
| | fusion) | | | | | |
| t612532 | Library | t524736 | 66244.47 | 73441.78 | 24263.57 | 27624.32 |
| | (Chimeric | | | | | |
| | fusion) | | | | | |
| t612534 | Library | t524816 | 68480.87 | 75414.48 | 3807.088 | 4581.189 |
| | (Chimeric | | | | | |
| | fusion) | | | | | |
| t612548 | Library | t526650 | 69087.54 | 76426.63 | 7602.177 | 8644.452 |
| | (Chimeric | | | | | |
| | fusion) | | | | | |
| t612542 | Library | t524736 | 70521.38 | 83974.33 | 24560.97 | 28229.23 |
| | (Chimeric | | | | | |
| | fusion) | | | | | |
| t612552 | Library | t523834 | 72365.77 | 80657.95 | 21770.95 | 26275.44 |
| | (Chimeric | | | | | |
| | fusion) | | | | | |
| t612544 | Library | t526650 | 77279.31 | 88492.62 | 17820.36 | 22635.91 |
| | (Chimeric | | | | | |
| | fusion) | | | | | |
| t612550 | Library | t524736 | 86331.69 | 94606.46 | 23037.33 | 26968.89 |
| | (Chimeric | | | | | |
| | fusion) | | | | | |
| t612546 | Library | t523834 | 86637.57 | 95059.89 | 24272.24 | 26793.25 |
| | (Chimeric | | | | | |
| | fusion) | | | | | |
| t612535 | Library | t523834 | 94164.23 | 104013.7 | 38477.85 | 47236.42 |
| | (Chimeric | | | | | |
| | fusion) | | | | | |

[0575] Out of the chimeric PTs with point mutations that were screened, the following strains produced at least 20.000 μg/L CBGA and/or at least 3000 μg/L CBGVA, as shown in Table 7: strain t612585, which was based on the chimeric PT sequence within strain t524816 described in Examples 1 and 2, and also contained a F245R substitution; strain t612578, which was based on the chimeric PT sequence within strain t524816 described in Examples 1 and 2, and also contained C31F and S232R substitutions; strain t612568, which was based on the chimeric PT sequence within strain t526650 described in Examples 1 and 2, and also contained a S232R substitution; strain t612582, which was based on the chimeric PT sequence within strain t526650 described in Examples 1 and 2, and also contained a F245R substitution; strain t612572, which was based on the chimeric PT sequence within strain t524816 described in Examples 1 and 2, and also contained a S232R substitution; strain t612574, which was based on the chimeric PT sequence within strain t526650 described in Examples 1 and 2, and also contained a C31F substitution; strain t612588, which was based on the chimeric PT sequence within strain t524816 described in Examples 1 and 2, and also contained C31F and F245R substitutions; and strain t612586, which was based on the chimeric PT sequence within strain t524816 described in Examples 1 and 2, and also contained C31F, F245R, and S232R substitutions.

### Example 4: Functional Expression of Chimeric Fusions

[0576] CsPT chimeras from strains from Examples 1 and 2 (corresponding to strains t523578, t523602, t523722, t523777, t523834, t524736, t524816, t524866, t525864, t526650, t526890, and t526897) were fused with ERG20ww and screened for activity.

[0577] The chimeric fusions were screened for activity as part of the Gen 2 library. Strain t612212, expressing a truncated CsPT4 protein (SEQ ID NO: 5), was included as a positive control. The assay used to assess CBGAS activity was the same as the assay described in Example 1 except that 1 mM olivetolic acid and 1 mM divaric acid were separately used as substrates in parallel assays, and both CBGA and CBGVA production were measured using LC-MS on three biological replicates. Table 7 and FIGS. 12A-B show the results of the Gen. 2 PT library screen. Sequences of the chimeric fusions are provided in Table 14. Sequences of individual portions of representative chimeric PTs are provided in Table 15.

[0578] Out of the chimeric fusions that were screened, the following strains produced at least 13,000 μg/L CBGA and/or at least 3000 μg/L CBGVA, as shown in Table 7: strain t612561, which was based on the chimeric PT sequence within strain t524816 described in Examples 1 and 2; strain t612551, which was based on the chimeric PT sequence within strain t526897 described in Examples 1 and 2; strain t612543, which was based on the chimeric PT sequence within strain t523777 described in Examples 1 and 2; strain t612558, which was based on the chimeric PT sequence within strain t523777 described in Examples 1 and 2; strain t612559, which was based on the chimeric PT sequence within strain t523777 described in Examples 1 and 2; strain t612538, which was based on the chimeric PT sequence within strain t526650 described in Examples 1 and 2; strain t612564, which was based on the chimeric PT sequence within strain t523834 described in Examples 1 and 2; strain t612537, which was based on the chimeric PT sequence within strain t526650 described in Examples 1 and 2; strain t612565, which was based on the chimeric PT sequence within strain t523834 described in Examples 1 and 2; strain t612536, which was based on the chimeric PT sequence within strain t524816 described in Examples 1 and 2; strain t612566, which was based on the chimeric PT sequence within strain t526650 described in Examples 1 and 2; strain t612547, which was based on the chimeric PT sequence within strain t524816 described in Examples 1 and 2; strain t612539, which was based on the chimeric PT sequence within strain t524736 described in Examples 1 and 2; strain t612555, which was based on the chimeric PT sequence within strain t524816 described in Examples 1 and 2; strain t612563, which was based on the chimeric PT sequence within strain t524736 described in Examples 1 and 2; strain t612549, which was based on the chimeric PT sequence within strain t524816 described in Examples 1 and 2; strain t612532, which was based on the chimeric PT sequence within strain t524736 described in Examples 1 and 2; strain t612534, which was based on the chimeric PT sequence within strain t524816 described in Examples 1 and 2; strain t612548, which was based on the chimeric PT sequence within strain t526650 described in Examples 1 and 2; strain t612542, which was based on the chimeric PT sequence within strain t524736 described in Examples 1 and 2; strain t612552, which was based on the chimeric PT sequence within strain t523834 described in Examples 1 and 2; strain t612544, which was based on the chimeric PT sequence within strain t526650 described in Examples 1 and 2; strain t612550, which was based on the chimeric PT sequence within strain t524736 described in Examples 1 and 2; strain t612546, which was based on the chimeric PT sequence within strain t523834 described in Examples 1 and 2; and strain t612535, which was based on the chimeric PT sequence within strain t523834 described in Examples 1 and 2.

### Example 5: Further Engineering of Chimeric Fusions

[0579] Chimeric fusions expressed by strains t612534 and t612535 from the Gen 2 PT library described in Example 3, and a chimeric PT expressed by strain t524866 from the library described in Example 1, were used as templates for additional engineering to generate a Gen 3 library. All chimeric PTs in the Gen 3 library included portions of two different CsPT proteins and all members of the library were expressed as ERG20ww-PT chimeric fusions. Strain t612534 from the Gen 2 library was created based on strain t524816, which was one of the high-performing chimeras shown in Table 5. Strain t612535 from the Gen 2 library was created based on strain t523834, which was one of the high-performing chimeras shown in Table 5. Strain t524866 was one of the high-performing chimeras shown in Table 5.

[0580] The performance of the chimeric PTs with point mutations that were screened in the Gen 2 library was used to inform the incorporation of additional mutations that were implicated in improving CBGA titer in Example 1. Specifically, the following point mutations were tested in the context of chimeric fusions, either alone or in combination, as shown in Table 8: M43L, I86S, Q288R, S232R, I147L, C31F, F245R, M87V, D94E, I86V, L311R, L311N, I86A, and Q162R.

[0581] The assay used to assess CBGAS activity of the Gen 3 library was the same as the assay described in Example 3 except that four biological replicates of each strain were screened. Table 8 and FIG. 13 show the results of the Gen 3 library screen. Sequences are provided in Table 16.

TABLE 8
Activity data of Gen 3 library members in S. cerevisiae

| | | | Average | Standard |
|---|---|---|---|---|
| Strain | Strain type | | CBGA | Deviation CBGA |
| ID | PT type | Point mutations | [μg/L] | [μg/L] |
| t704346 | Library | N/A | 109743.3 | 15182.41 |
| | (Chimeric fusion) | | | |
| t721519 | Library | M43L I86S Q288R | 13889.06 | 3081.353 |
| | (Chimeric fusion) | S232R I147L C31F | | |
| | | F245R M87V D94E | | |
| t721611 | Library | I86V M43L Q288R | 18489.32 | 6955.197 |
| | (Chimeric fusion) | L311R S232R I147L | | |
| | | C31F F245R M87V | | |
| t721527 | Library | M43L I86S Q288R | 18839.52 | 7950.718 |
| | (Chimeric fusion) | L311R S232R I147L | | |
| | | F245R M87V D94E | | |
| t721503 | Library | L311N M43L I86S | 20501.72 | 16284.37 |
| | (Chimeric fusion) | Q288R S232R I147L | | |
| | | C31F F245R M87V | | |
| t721595 | Library | I86V M43L Q288R | 22533.01 | 4246.082 |
| | (Chimeric fusion) | L311R S232R I147L | | |
| | | C31F M87V D94E | | |
| t721541 | Library | M43L I86S Q288R | 26768.28 | 9243.536 |
| | (Chimeric fusion) | L311R S232R I147L | | |
| | | C31F M87V D94E | | |
| t721431 | Library | I86A M43L Q288R | 28851.15 | 6522.44 |
| | (Chimeric fusion) | L311R S232R I147L | | |
| | | C31F M87V D94E | | |
| t721589 | Library | L311N I86A M43L | 29596.66 | 5303.2 |
| | (Chimeric fusion) | Q288R S232R I147L | | |
| | | C31F M87V D94E | | |
| t721567 | Library | I86V Q162R | 30288.03 | 21028.47 |
| | (Chimeric fusion) | | | |
| t721539 | Library | L311N I86V M43L | 31171.05 | 9936.614 |
| | (Chimeric fusion) | Q288R S232R I147L | | |
| | | C31F M87V D94E | | |
| t721563 | Library | I86V Q288R L311R | 31919.31 | 24025.56 |
| | (Chimeric fusion) | S232R I147L C31F | | |
| | | F245R M87V D94E | | |
| t721551 | Library | I86V M43L I147L | 33198.67 | 19866.86 |
| | (Chimeric fusion) | | | |
| t721487 | Library | L311N M43L I86S | 34051.27 | 3019.408 |
| | (Chimeric fusion) | Q288R S232R I147L | | |
| | | C31F M87V D94E | | |
| t721581 | Library | L311N I86A M43L | 34162.05 | 9029.252 |
| | (Chimeric fusion) | Q288R S232R I147L | | |
| | | F245R M87V D94E | | |
| t721485 | Library | M43L I86S I147L | 34590.32 | 15526.48 |
| | (Chimeric fusion) | | | |
| t721553 | Library | M43L I86S Q288R | 35227.77 | 1870.526 |
| | (Chimeric fusion) | L311R S232R I147L | | |
| | | C31F F245R M87V | | |
| t721477 | Library | L311N M43L I86S | 35358.3 | 11073.72 |
| | (Chimeric fusion) | Q288R S232R I147L | | |
| | | F245R M87V D94E | | |
| t721583 | Library | I86A S232R I147L | 35715.61 | 50509.5 |
| | (Chimeric fusion) | | | |
| t721501 | Library | M43L I86S Q162R | 36055.5 | 9026.377 |
| | (Chimeric fusion) | | | |
| t721605 | Library | L311N I86A M43L | 36423.18 | 1899.968 |
| | (Chimeric fusion) | Q288R S232R I147L | | |
| | | C31F F245R M87V | | |
| t721597 | Library | L311N I86A M43L | 36593.2 | 1185.784 |
| | (Chimeric fusion) | Q288R S232R I147L | | |
| | | C31F F245R D94E | | |
| t721457 | Library | Q162R I147L | 36926.83 | 3370.906 |
| | (Chimeric fusion) | | | |
| t721449 | Library | I86A M43L Q288R | 37045.45 | 5332.656 |
| | (Chimeric fusion) | L311R S232R I147L | | |
| | | C31F F245R M87V | | |
| t721569 | Library | I86V M43L Q162R | 37409.64 | 5798.489 |
| | (Chimeric fusion) | | | |
| t721453 | Library | M43L Q162R I147L | 37548.49 | 9343.732 |
| | (Chimeric fusion) | | | |
| t721525 | Library | M43L S232R | 37879.24 | 18383.01 |
| | (Chimeric fusion) | | | |
| t721439 | Library | I86A M43L Q288R | 38033.7 | 6513.884 |
| | (Chimeric fusion) | L311R S232R I147L | | |
| | | C31F F245R D94E | | |
| t721573 | Library | L311N I86A M43L | 38813.25 | N/A |
| | (Chimeric fusion) | S232R I147L C31F | | |
| | | F245R M87V D94E | | |
| t721533 | Library | I86V Q288R I147L | 40638.64 | 18125.19 |
| | (Chimeric fusion) | | | |
| t721609 | Library | I86A Q162R | 40819.5 | 12533.58 |
| | (Chimeric fusion) | | | |
| t721529 | Library | M43L Q162R | 41080.92 | 9743.81 |
| | (Chimeric fusion) | | | |
| t721549 | Library | M43L I86S Q288R | 41320.79 | 31673.68 |
| | (Chimeric fusion) | L311R S232R I147L | | |
| | | C31F F245R D94E | | |
| t721505 | Library | M43L Q288R L311R | 41547.59 | 23797.39 |
| | (Chimeric fusion) | S232R I147L C31F | | |
| | | F245R M87V D94E | | |
| t721515 | Library | M43L I147L | 41788.8 | 18840.06 |
| | (Chimeric fusion) | | | |
| t721523 | Library | I86V Q162R I147L | 42614.72 | 8505.742 |
| | (Chimeric fusion) | | | |
| t721619 | Library | I86A Q288R L311R | 42649.28 | 17652.2 |
| | (Chimeric fusion) | S232R I147L C31F | | |
| | | F245R M87V D94E | | |
| t721565 | Library | L311N I86A Q288R | 42939.04 | 9899.911 |
| | (Chimeric fusion) | S232R I147L C31F | | |
| | | F245R M87V D94E | | |
| t721429 | Library | I86A M43L Q162R | 42984.76 | 7672.967 |
| | (Chimeric fusion) | | | |
| t721479 | Library | M43L Q288R Q162R | 43970.59 | 8510.879 |
| | (Chimeric fusion) | | | |
| t721435 | Library | I86A M43L Q288R | 44255.76 | 4267.035 |
| | (Chimeric fusion) | | | |
| t721585 | Library | I86V M43L | 44462.92 | 18971.29 |
| | (Chimeric fusion) | | | |
| t721531 | Library | L311N I86V M43L | 44675.43 | 20221.1 |
| | (Chimeric fusion) | Q288R S232R I147L | | |
| | | F245R M87V D94E | | |
| t721511 | Library | M43L I86S L311R | 45033.76 | 1508.976 |
| | (Chimeric fusion) | S232R I147L C31F | | |
| | | F245R M87V D94E | | |
| t721441 | Library | I86S Q288R Q162R | 45057.23 | 8202.466 |
| | (Chimeric fusion) | | | |
| t721557 | Library | L311N I86V M43L | 46319.13 | 2184.859 |
| | (Chimeric fusion) | Q288R S232R I147L | | |
| | | C31F F245R M87V | | |
| t721499 | Library | I86S Q162R | 46805.05 | 11932.21 |
| | (Chimeric fusion) | | | |
| t721547 | Library | L311N I86V M43L | 46986.1 | N/A |
| | (Chimeric fusion) | Q288R S232R I147L | | |
| | | C31F F245R D94E | | |
| t721475 | Library | Q288R Q162R | 47333.96 | 12957.93 |
| | (Chimeric fusion) | | | |
| t721633 | Library | I86A M43L Q288R | 47493.71 | 41309.64 |
| | (Chimeric fusion) | S232R I147L C31F | | |
| | | F245R M87V D94E | | |
| t721613 | Library | Q288R S232R I147L | 47798.65 | 11325.36 |
| | (Chimeric fusion) | | | |
| t721497 | Library | I86S Q288R L311R | 48022.9 | 10656.39 |
| | (Chimeric fusion) | S232R I147L C31F | | |
| | | F245R M87V D94E | | |
| t721631 | Library | I86A M43L S232R | 49208.88 | 8037.554 |
| | (Chimeric fusion) | | | |
| t721593 | Library | I86A I147L | 49970.05 | N/A |
| | (Chimeric fusion) | | | |
| t721521 | Library | L311N I86V M43L | 50084.12 | 5360.024 |
| | (Chimeric fusion) | S232R I147L C31F | | |
| | | F245R M87V D94E | | |
| t721591 | Library | I86A Q162R I147L | 50121.85 | 2669.096 |
| | (Chimeric fusion) | | | |
| t721483 | Library | I86S I147L | 50166.32 | 12366.79 |
| | (Chimeric fusion) | | | |
| t721433 | Library | I86S Q288R S232R | 50239.79 | 7384.03 |
| | (Chimeric fusion) | | | |
| t721615 | Library | I86A Q288R Q162R | 50407.14 | 1235.417 |
| | (Chimeric fusion) | | | |
| t721579 | Library | I86V M43L Q288R | 50585.97 | N/A |
| | (Chimeric fusion) | S232R I147L C31F | | |
| | | F245R M87V D94E | | |
| t721495 | Library | L311N M43L I86S | 51175.07 | 6278.16 |
| | (Chimeric fusion) | Q288R S232R I147L | | |
| | | C31F F245R D94E | | |
| t721545 | Library | M43L I86S | 52487.65 | 3181.85 |
| | (Chimeric fusion) | | | |
| t721543 | Library | I86V Q288R Q162R | 52510.84 | 6859.685 |
| | (Chimeric fusion) | | | |
| t721509 | Library | M43L I86S Q288R | 52789.12 | 9812.321 |
| | (Chimeric fusion) | | | |
| t721559 | Library | I86V S232R | 53665.3 | 22292.97 |
| | (Chimeric fusion) | | | |
| t721517 | Library | I86V S232R I147L | 53934.61 | 9895.052 |
| | (Chimeric fusion) | | | |
| t721535 | Library | M43L Q288R | 55672.1 | 10047.52 |
| | (Chimeric fusion) | | | |
| t721555 | Library | I86V I147L | 55733 | 14721.98 |
| | (Chimeric fusion) | | | |
| t721447 | Library | M43L S232R I147L | 55837.27 | 17797.46 |
| | (Chimeric fusion) | | | |
| t721561 | Library | I86V M43L S232R | 55904.73 | 20109.23 |
| | (Chimeric fusion) | | | |
| t721537 | Library | I86V Q288R S232R | 56153.05 | 18905.88 |
| | (Chimeric fusion) | | | |
| t721451 | Library | L311N I86S Q288R | 58149.64 | 13257.07 |
| | (Chimeric fusion) | S232R I147L C31F | | |
| | | F245R M87V D94E | | |
| t721513 | Library | L311N I86V Q288R | 59769.79 | 12244.96 |
| | (Chimeric fusion) | S232R I147L C31F | | |
| | | F245R M87V D94E | | |
| t721459 | Library | L311N M43L Q288R | 60443.06 | 14663.24 |
| | (Chimeric fusion) | S232R I147L C31F | | |
| | | F245R M87V D94E | | |
| t721471 | Library | M43L Q288R S232R | 60636.01 | 19027.41 |
| | (Chimeric fusion) | | | |
| t721617 | Library | I86A Q288R | 61026.93 | 15840.07 |
| | (Chimeric fusion) | | | |
| t721493 | Library | M43L I86S S232R | 61690.62 | 6827.457 |
| | (Chimeric fusion) | | | |
| t721491 | Library | I86S S232R | 63843.77 | 11066.42 |
| | (Chimeric fusion) | | | |
| t721507 | Library | I86S Q288R | 65105.45 | 7777.364 |
| | (Chimeric fusion) | | | |
| t721599 | Library | I86A Q288R I147L | 71340.32 | 11852.97 |
| | (Chimeric fusion) | | | |
| t721601 | Library | I86A S232R | 71918.54 | 18251.01 |
| | (Chimeric fusion) | | | |
| t721469 | Library | L311N M43L I86S | 72470.49 | 11594.61 |
| | (Chimeric fusion) | S232R I147L C31F | | |
| | | F245R M87V D94E | | |
| t721443 | Library | S232R I147L | 77020.02 | 14516.1 |
| | (Chimeric fusion) | | | |
| t721467 | Library | Q288R S232R | 77867.5 | 11337.85 |
| | (Chimeric fusion) | | | |
| t721629 | Library | I86S S232R I147L | 80761.42 | 11126.84 |
| | (Chimeric fusion) | | | |
| t721461 | Library | M43L Q288R I147L | 87461.94 | 17781.56 |
| | (Chimeric fusion) | | | |
| t704382 | Library | F245R | 98603.55 | 11623.97 |
| | (Chimeric fusion) | | | |
| t721465 | Library | Q288R I147L | 102133.6 | 16464.64 |
| | (Chimeric fusion) | | | |
| t721639 | Library | I86S Q288R I147L | 109375.4 | N/A |
| | (Chimeric fusion) | | | |
| t721427 | Library | N/A | 0 | 0 |
| | (Chimeric fusion) | | | |
| t721437 | Library | N/A | 0 | 0 |
| | (Chimeric fusion) | | | |
| t721445 | Library | N/A | 0 | 0 |
| | (Chimeric fusion) | | | |
| t721455 | Library | | 0 | 0 |
| | (Chimeric fusion) | | | |
| t721463 | Library | N/A | 0 | 0 |
| | (Chimeric fusion) | | | |
| t721473 | Library | N/A | 0 | 0 |
| | (Chimeric fusion) | | | |
| t721481 | Library | N/A | 0 | 0 |
| | (Chimeric fusion) | | | |
| t721489 | Library | N/A | 0 | 0 |
| | (Chimeric fusion) | | | |
| t721575 | Library | I86V M43L Q288R | 0 | 0 |
| | (Chimeric fusion) | | | |
| t721607 | Library | I86A Q288R S232R | 0 | 0 |
| | (Chimeric fusion) | | | |

[0582] Strain t704346 was used as the benchmark for determining hits in the Gen 3 library. Specifically, strains with CBGA production above 75-95% of the average CBGA titer of t704346 were considered hits.

### Example 6: Identification of ERG20 Homologs for Use Infusion Proteins with Chimeric PTs

[0583] A library of candidate ERG20 homologs was generated to identify additional fusion partners for chimeric PTs. The ERG20 homologs were engineered to contain tryptophan at residues corresponding to amino acid positions F96 and/or N127 in S. cerevisiae ERG20. Engineered ERG20 homologs were fused C-terminally to the chimeric PT expressed by strain t524816, described in Examples 1 and 2, comprising portions of CsPT4 and CsPT7, to create a library of 2,487 strains. Protein sequences were recoded in silico for expression in S. cerevisiae and synthesized in the replicative yeast expression vector shown in FIG. 8. Strain t756349, comprising a fusion of ERG20ww and the chimeric PT expressed by strain t524816 was used as a positive control and to establish hit ranking. Strain t756346, expressing a fusion of wildtype ERG20 and the chimeric PT expressed by strain t524816 was used to assess the improvement in CBGA production due to the presence of the two tryptophan substitutions in ERG20ww relative to wildtype ERG20. Strain t756347, expressing a fusion of the fluorescent protein RFP and the PT chimera harbored by strain t524816, was used as a negative control.

[0584] This chimeric fusion library was assayed for activity in a primary screen using a prenyltransferase assay which was conducted as follows: each thawed glycerol stock was stamped into a well of YEP medium+4% dextrose media. Samples were incubated at 30° C. in a shaking incubator for 2 days. A portion of each of the resulting cultures was stamped into a well of YEP medium+2% raffinose+2% galactose+1 mM olivetolic acid (C6). Samples were incubated at 30° C. and shaken in a shaking incubator for 4 days. A portion of each of the resulting production cultures was stamped into a well of phosphate buffered saline (PBS). Optical measurements were taken on a plate reader, with absorbance measured at 600 nm and fluorescence at 558 nm with 605 nm excitation. A portion of each of the production cultures was stamped into a well of 100% methanol in half-height deepwell plates. Plates were heat sealed and frozen. Samples were then thawed for 30 minutes and spun down at 4° C. A portion of the supernatant was stamped into half-area 96 well plates. CBGA production in the samples was measured via liquid chromatography-mass spectrometry (LC-MS) by measuring relative peak areas. CBGA production was quantified in μg/L by comparing LC/MS peak areas to a standard curve for CBGA.

[0585] LC-MS analysis revealed that 232 strains out of 2,487 strains generated higher CBGA titers than either of the two positive control strains. Of these, 156 strains were elevated to a secondary assay to confirm their activity. The secondary assay was performed in the same manner as the primary assay with the exception that three biological replicates were included for each strain. Table 9 provides data for the 51 strains identified in the secondary screen that demonstrated higher mean CBGA titers than either positive control (FIG. 14). These 51 strains were found to generate at least 200000 μg/L CBGA, with strains t768404 and t766095 generating more than 400000 μg/L CBGA. The ERG20 homologs expressed by these strains represent promising candidates for N-terminal fusion partners for the PTs described in Examples 1-4. In particular the ERG20 homologs sourced from Kwoniella bestiolae (UniProt accession A0A1B9FXJ1; strain t766469), Pseudogymnoascus sp (UniProt accession A0A094HBN6; strain t766201), and Debaryomyces hansenii (UniProt accession Q6BM51; strain t766095) were selected for further analysis.

TABLE 9
Screening activity data of ERG20 homolog
library described in Example 6

| | | Average | Standard |
|---|---|---|---|
| Strain | Strain Type/UniProt | CBGA | Deviation CBGA |
| ID | Accession No. | [μg/L] | [μg/L] |
| t756347 | RFP Negative Control | 71454.58 | 45276.26 |
| t756346 | ERG20 Positive Control | 139335.35 | 22784.51 |
| | UniProt Accession No. | | |
| | P08524 | | |
| t756349 | ERG20ww Positive | 217038.20 | 45255.36 |
| | Control | | |
| | UniProt Accession No. | | |
| | P08524 | | |
| t766469 | Library | 214618.91 | 29131.89 |
| | UniProt Accession No. | | |
| | A0A1B9FXJ1 | | |
| t766132 | Library | 220512.78 | 4294.99 |
| | UniProt Accession No. | | |
| | A0A0L139D1 | | |
| t766504 | Library | 220615.17 | 29851.95 |
| | UniProt Accession No. | | |
| | A8PB79 | | |
| t766593 | Library | 221529.52 | 38864.81 |
| | UniProt Accession No. | | |
| | G1X2B3 | | |
| t766467 | Library | 223414.45 | 11951.96 |
| | UniProt Accession No. | | |
| | A0A1C7NP81 | | |
| t766152 | Library | 230281.35 | 14362.33 |
| | UniProt Accession No. | | |
| | A0A0U5GM00 | | |
| t766629 | Library | 232560.14 | 10690.82 |
| | UniProt Accession No. | | |
| | A0A093ZCS9 | | |
| t767697 | Library | 233588.88 | 44030.98 |
| | UniProt Accession No. | | |
| | M5GG98 | | |
| t766672 | Library | 236749.70 | 11755.96 |
| | UniProt Accession No. | | |
| | H6BT51 | | |
| t766111 | Library | 237007.65 | 888.75 |
| | UniProt Accession No. | | |
| | A0A225B7V9 | | |
| t766340 | Library | 237353.70 | 15551.58 |
| | UniProt Accession No. | | |
| | K2RVP5 | | |
| t766148 | Library | 237647.35 | 30159.01 |
| | UniProt Accession No. | | |
| | A0A1B7P2J8 | | |
| t766308 | Library | 241289.81 | 49458.69 |
| | UniProt Accession No. | | |
| | A0A1B8DWN7 | | |
| t765947 | Library | 241617.80 | 109375.71 |
| | UniProt Accession No. | | |
| | G8ZRX5 | | |
| t765987 | Library | 242172.50 | 24234.55 |
| | UniProt Accession No. | | |
| | A0A2H3H5S3 | | |
| t767109 | Library | 242937.43 | 11536.39 |
| | UniProt Accession No. | | |
| | A0A1G4KG41 | | |
| t766404 | Library | 243961.52 | 39580.10 |
| | UniProt Accession No. | | |
| | A0A1A0HBK2 | | |
| t768423 | Library | 246190.88 | 10681.19 |
| | UniProt Accession No. | | |
| | R7S2J9 | | |
| t767236 | Library | 249887.24 | 11503.32 |
| | UniProt Accession No. | | |
| | W1QIU7 | | |
| t766101 | Library | 251351.45 | 31159.81 |
| | UniProt Accession No. | | |
| | B8MAT2 | | |
| t765981 | Library | 251465.24 | 8111.58 |
| | UniProt Accession No. | | |
| | A0A151N659 | | |
| t767135 | Library | 252456.18 | 32252.26 |
| | UniProt Accession No. | | |
| | A0A1Q5UIR3 | | |
| t766263 | Library | 256417.46 | 23459.79 |
| | UniProt Accession No. | | |
| | A0A165DW64 | | |
| t766601 | Library | 256635.65 | 11627.73 |
| | UniProt Accession No. | | |
| | B6K405 | | |
| t767176 | Library | 262466.12 | 47023.13 |
| | UniProt Accession No. | | |
| | A0A1E3QBG8 | | |
| t766406 | Library | 267311.70 | 21804.03 |
| | UniProt Accession No. | | |
| | A0A1R0GPX8 | | |
| t768409 | Library | 269071.54 | 14545.34 |
| | UniProt Accession No. | | |
| | P08524 | | |
| t766650 | Library | 269596.06 | 12599.25 |
| | UniProt Accession No. | | |
| | A0A093XCN7 | | |
| t766129 | Library | 269769.02 | 23305.89 |
| | UniProt Accession No. | | |
| | G1X2B3 | | |
| t766740 | Library | 269964.77 | 13013.87 |
| | UniProt Accession No. | | |
| | A0A0C7NDP3 | | |
| t765825 | Library | 270522.15 | 17858.87 |
| | UniProt Accession No. | | |
| | W6YHT5 | | |
| t766639 | Library | 270534.32 | 28222.77 |
| | UniProt Accession No. | | |
| | A0A0F7TT74 | | |
| t765979 | Library | 270560.02 | 13113.97 |
| | UniProt Accession No. | | |
| | A0A1L9RD60 | | |
| t767808 | Library | 271451.55 | 25968.15 |
| | UniProt Accession No. | | |
| | A0A0C3S0Z8 | | |
| t767611 | Library | 276121.67 | 47485.23 |
| | UniProt Accession No. | | |
| | W0T5C0 | | |
| t766017 | Library | 278992.34 | 14797.49 |
| | UniProt Accession No. | | |
| | A0A1Y2HMF7 | | |
| t766201 | Library | 279773.20 | 31427.85 |
| | UniProt Accession No. | | |
| | A0A094HBN6 | | |
| t765881 | Library | 280115.24 | 6376.44 |
| | UniProt Accession No. | | |
| | A0A1B8D7F8 | | |
| t766011 | Library | 285446.12 | 25280.37 |
| | UniProt Accession No. | | |
| | W9YHW7 | | |
| t766043 | Library | 292288.94 | 50804.41 |
| | UniProt Accession No. | | |
| | C4QY32 | | |
| t766077 | Library | 292936.87 | 12638.64 |
| | UniProt Accession No. | | |
| | A0A1G4MGY0 | | |
| t766103 | Library | 302283.63 | 7255.66 |
| | UniProt Accession No. | | |
| | T0Q3I5 | | |
| t766115 | Library | 302770.65 | 58626.99 |
| | UniProt Accession No. | | |
| | A0A0F9Z7F4 | | |
| t766304 | Library | 317453.64 | 3294.56 |
| | UniProt Accession No. | | |
| | A0A2H0ZLN6 | | |
| t768416 | Library | 324513.69 | 25839.79 |
| | UniProt Accession No. | | |
| | W7I4W9 | | |
| t765857 | Library | 325501.06 | 13171.54 |
| | UniProt Accession No. | | |
| | G0W361 | | |
| t768386 | Library | 331626.97 | 19113.89 |
| | UniProt Accession No. | | |
| | A0A1D2VIM1 | | |
| t766051 | Library | 347717.12 | 52075.70 |
| | UniProt Accession No. | | |
| | G8JX22 | | |
| t765739 | Library | 378842.07 | 11804.91 |
| | UniProt Accession No. | | |
| | A0A1E4RE25 | | |
| t766094 | Library | 407946.27 | 32968.01 |
| | UniProt Accession No. | | |
| | B6K405 | | |
| t768404 | Library | 437126.53 | 15533.53 |
| | UniProt Accession No. | | |
| | A0A1L0BIM2 | | |
| t766095 | Library | 471588.30 | 53964.99 |
| | UniProt Accession No. | | |
| | Q6BM51 | | |

[0586] Analysis of ERG20 homologs using a motif identification software identified multiple sequence motifs that were enriched in chimeric fusions that produce CBGA (Table 10). Table 17 provides sequence information for the ERG20 homologs contained within the chimeric fusions described in this Example. Table 18 provides sequence information for the chimeric fusions described in this Example.

TABLE 10
Non-limiting examples of ERG20 homolog motifs

| | Reference sequence | | | | |
|---|---|---|---|---|---|
| | for amino acid | | | | |
| | numbering | | | | |
| | (UniProt P08524; | | | | Erg20 |
| | SEQ ID NO: 424) | | Motif sequence in | | SEQ |
| Motif | start | end | strain | Strain | ID NO |
| NVPGGKLNR (SEQ | 47 | 55 | NVPGGKLNR (SEQ | t766132 | 426 |
| ID NO: 647) | | | ID NO: 647) | t766504 | 427 |
| | | | | t766467 | 429 |
| | | | | t766152 | 430 |
| | | | | t768423 | 442 |
| | | | | t765979 | 457 |
| | | | | 1767808 | 458 |
| FYLPVALA[LM]H | 203 | 212 | FYLPVALALH (SEQ | 1766629 | 431 |
| (SEQ ID NO: 648) | | | ID NO: 649) | t766672 | 433 |
| | | | | t766148 | 436 |
| | | | | t766308 | 437 |
| | | | | t765987 | 439 |
| | | | | t766650 | 452 |
| | | | | t765979 | 457 |
| | | | | t766201 | 461 |
| | | | | t765881 | 462 |
| | | | | t766011 | 463 |
| | | | FYLPVALAMH (SEQ | t766467 | 429 |
| | | | ID NO: 650) | t768423 | 442 |
| | | | | t766263 | 447 |
| | | | | t766051 | 472 |
| A[EH]D[IV]LIPLG | 225 | 233 | AEDILIPLG (SEQ ID | t765987 | 439 |
| (SEQ ID NO: 651) | | | NO: 652) | t766650 | 452 |
| | | | AHDILIPLG (SEQ ID | t766132 | 426 |
| | | | NO: 653) | t766467 | 429 |
| | | | | t766152 | 430 |
| | | | | t766672 | 433 |
| | | | | t766148 | 436 |
| | | | | t767135 | 446 |
| | | | | t766639 | 456 |
| | | | | t766011 | 463 |
| | | | | t768386 | 471 |
| | | | AHDVLIPLG (SEQ ID | t765947 | 438 |
| | | | NO: 654) | t766129 | 453 |
| | | | | t766593 | 428 |
| | | | | t767176 | 449 |
| LGW[CL][ITV]ELLQ | 85 | 97 | LGWLTELLQAYFL | t766201 | 461 |
| A[FY]FL (SEQ ID NO: | | | (SEQ ID NO: 656) | t766308 | 437 |
| 655) | | | LGWLTELLQAFFL | t765979 | 457 |
| | | | (SEQ ID NO: 657) | t766011 | 463 |
| | | | | t766132 | 426 |
| | | | LGWCIELLQAYFL | t765739 | 473 |
| | | | (SEQ ID NO: 658) | t765857 | 470 |
| | | | | t765947 | 438 |
| | | | | t766077 | 465 |
| | | | | t766095 | 476 |
| | | | | t767611 | 459 |
| | | | | t768386 | 471 |
| | | | | t768404 | 475 |
| | | | | t768409 | 451 |
| | | | LGWCVELLQAYFL | t766043 | 464 |
| | | | (SEQ ID NO: 659) | t766051 | 472 |
| | | | LGWCVELLQAFFL | t766263 | 447 |
| | | | (SEQ ID NO: 660) | t767697 | 432 |
| | | | | t767808 | 458 |
| | | | LGWCIELLQAFFL | t766094 | 474 |
| | | | (SEQ ID NO: 661) | t768423 | 442 |
| | | | | t766129 | 453 |
| | | | LGWCTELLQAFFL | t768416 | 469 |
| | | | (SEQ ID NO: 662) | | |
| KKEV[FL][ET][SA]FL | 336 | 349 | KKEVFESFLAKIYK | t766639 | 456 |
| [AGN]KIYK (SEQ ID | | | (SEQ ID NO: 664) | t767135 | 446 |
| NO: 663) | | | KKEVFEAFLGKIYK | t766152 | 430 |
| | | | (SEQ ID NO: 665) | | |
| | | | KKEVLTSFLNKIYK | t768416 | 469 |
| | | | (SEQ ID NO: 666) | | |
| QRK[VI]L[DE]ENYG | 279 | 288 | QRKVLDENYG (SEQ | t766672 | 433 |
| (SEQ ID NO: 667) | | | ID NO: 668) | t766263 | 447 |
| | | | | t766601 | 448 |
| | | | | t766740 | 454 |
| | | | | t767611 | 459 |
| | | | | t766011 | 463 |
| | | | | t765857 | 470 |
| | | | | t766094 | 474 |
| | | | | t768404 | 475 |
| | | | QRKILDENYG (SEQ | t767176 | 449 |
| | | | ID NO: 669) | t765881 | 462 |
| | | | QRKILEENYG (SEQ | t765987 | 439 |
| | | | ID NO: 670) | | |
| | | | QRKVLEENYG (SEQ | t766629 | 431 |
| | | | ID NO: 671) | t766308 | 437 |
| | | | | t766650 | 452 |
| | | | | t766201 | 461 |
| VGMIAIWD (SEQ ID | 121 | 128 | VGMIAIWD (SEQ ID | t767697 | 432 |
| NO: 672) | | | NO: 672) | t766340 | 435 |
| | | | | t766148 | 436 |
| | | | | t766308 | 437 |
| | | | | t765987 | 439 |
| | | | | t766101 | 444 |
| | | | | t767176 | 449 |
| | | | | t766406 | 450 |
| | | | | t765825 | 455 |
| | | | | t766201 | 461 |
| | | | | t766011 | 463 |
| | | | | t766115 | 467 |
| TDI[QK]DNKCSW | 217 | 226 | TDIQDNKCSW (SEQ | t766152 | 430 |
| (SEQ ID NO: 673) | | | ID NO: 674) | t766111 | 434 |
| | | | | t766340 | 435 |
| | | | | t766148 | 436 |
| | | | | t765947 | 438 |
| | | | | t767109 | 440 |
| | | | | t766101 | 444 |
| | | | | t765981 | 445 |
| | | | | t767135 | 446 |
| | | | | t768409 | 451 |
| | | | | t766740 | 454 |
| | | | | t766639 | 456 |
| | | | | t767611 | 459 |
| | | | | t766043 | 464 |
| | | | | t766077 | 465 |
| | | | | t766103 | 466 |
| | | | | t765857 | 470 |
| | | | | t768386 | 471 |
| | | | | t766051 | 472 |
| | | | | t766132 | 426 |
| | | | TDIKDNKCSW (SEQ | t765987 | 439 |
| | | | ID NO: 675) | t766404 | 441 |
| | | | | t766406 | 450 |
| | | | | t765979 | 457 |
| | | | | t766115 | 467 |
| | | | | t766304 | 468 |
| | | | | t765739 | 473 |
| | | | | t768404 | 475 |
| | | | | t766095 | 476 |
| TAYYSFYLP (SEQ ID | 198 | 206 | TAYYSFYLP (SEQ ID | t766132 | 426 |
| NO: 676) | | | NO: 676) | t766504 | 427 |
| | | | | t766593 | 428 |
| | | | | t766467 | 429 |
| | | | | t766152 | 430 |
| | | | | t766629 | 431 |
| | | | | t767697 | 432 |
| | | | | t766672 | 433 |
| | | | | t766111 | 434 |
| | | | | t766340 | 435 |
| | | | | t766148 | 436 |
| | | | | t766308 | 437 |
| | | | | t765947 | 438 |
| | | | | t765987 | 439 |
| | | | | t767109 | 440 |
| | | | | t766404 | 441 |
| | | | | t767236 | 443 |
| | | | | t766101 | 444 |
| | | | | t767135 | 446 |
| | | | | t766263 | 447 |
| | | | | t766601 | 448 |
| | | | | t767176 | 449 |
| | | | | t768409 | 451 |
| | | | | t766650 | 452 |
| | | | | t766129 | 453 |
| | | | | t766740 | 454 |
| | | | | t765825 | 455 |
| | | | | t766639 | 456 |
| | | | | t765979 | 457 |
| | | | | t767611 | 459 |
| | | | | t766201 | 461 |
| | | | | t765881 | 462 |
| | | | | t766011 | 463 |
| | | | | t766043 | 464 |
| | | | | t766077 | 465 |
| | | | | t766304 | 468 |
| | | | | t768416 | 469 |
| | | | | t765857 | 470 |
| | | | | t768386 | 471 |
| | | | | t766051 | 472 |
| | | | | t765739 | 473 |
| | | | | t766094 | 474 |
| | | | | t768404 | 475 |
| | | | | t766095 | 476 |
| GKIGTDI[QK]DNKCS | 253 | 266 | GKIGTDIQDNKCSW | t766152 | 430 |
| W (SEQ ID NO: 677) | | | (SEQ ID NO: 678) | t766111 | 434 |
| | | | | t766340 | 435 |
| | | | | t766148 | 436 |
| | | | | t765947 | 438 |
| | | | | t767109 | 440 |
| | | | | t766101 | 444 |
| | | | | t765981 | 445 |
| | | | | t767135 | 446 |
| | | | | t768409 | 451 |
| | | | | t766740 | 454 |
| | | | | t766639 | 456 |
| | | | | t767611 | 459 |
| | | | | t766043 | 464 |
| | | | | t766077 | 465 |
| | | | | t766103 | 466 |
| | | | | t765857 | 470 |
| | | | | t768386 | 471 |
| | | | | t766051 | 472 |
| | | | GKIGTDIKDNKCSW | t766132 | 426 |
| | | | (SEQ ID NO: 679) | t765987 | 439 |
| | | | | t766404 | 441 |
| | | | | t765979 | 457 |
| | | | | t766115 | 467 |
| | | | | t766304 | 468 |
| | | | | t765739 | 473 |
| | | | | t768404 | 475 |
| | | | | t766095 | 476 |
| ILIP[LM] GEYFQ | 228 | 237 | ILIPLGEYFQ (SEQ ID | t766504 | 427 |
| (SEQ ID NO: 680) | | | NO: 681) | t766467 | 429 |
| | | | | t767697 | 432 |
| | | | | t766672 | 433 |
| | | | | t766111 | 434 |
| | | | | t765987 | 439 |
| | | | | t768423 | 442 |
| | | | | t766101 | 444 |
| | | | | t766263 | 447 |
| | | | | t767808 | 458 |
| | | | | t766011 | 463 |
| | | | | t766043 | 464 |
| | | | | t766115 | 467 |
| | | | | t768386 | 471 |
| | | | | t765739 | 473 |
| | | | | t766095 | 476 |
| | | | ILIPMGEYFQ (SEQ | t766340 | 435 |
| | | | ID NO: 682) | | |
| IL[VM][EP][ML]G | 228 | 237 | ILVPMGEYFQ (SEQ | t765825 | 455 |
| [ETHYF]FQ (SEQ ID | | | ID NO: 684) | | |
| NO: 683) | | | | | |
| AKIYKRSK (SEQ ID | 345 | 352 | AKIYKRSK (SEQ ID | t766672 | 433 |
| NO: 685) | | | NO: 685) | t765987 | 439 |
| | | | | t766011 | 463 |
| DPEVIGKI (SEQ ID | 248 | 255 | DPEVIGKI (SEQ ID | t766152 | 430 |
| NO: 686) | | | NO: 686) | | |
| RGQPCW[YF]RVP | 110 | 120 | RGQPCWYRVPE | t767109 | 440 |
| [EQ] (EQ ID NO: 687) | | | (SEQ ID NO: 688) | t766740 | 454 |
| IVKYKTA[YF]Y[ST]F | 193 | 206 | IVKYKTAFYSFYLP | t765981 | 445 |
| YLP (SEQ ID NO: | | | (SEQ ID NO: 690) | | |
| 689) | | | IVKYKTAYYSFYLP | t766111 | 434 |
| | | | (SEQ ID NO: 691) | t766101 | 444 |
| WC[IV]E[LW]LQA | 87 | 100 | WCIELLQAFFLVAD | t765981 | 445 |
| [YF][WF]LV[ALW]D | | | (SEQ ID NO: 693) | | |
| (SEQ ID NO: 692) | | | WCIELLQAFWLVAD | t766094 | 474 |
| | | | (SEQ ID NO: 694) | | |
| | | | WCIELLQAYFLVAD | t766601 | 448 |
| | | | (SEQ ID NO: 695) | t765947 | 438 |
| | | | | t768409 | 451 |
| | | | | t767611 | 459 |
| | | | | t766077 | 465 |
| | | | | t765857 | 470 |
| | | | | t768386 | 471 |
| | | | | t765739 | 473 |
| | | | | t768404 | 475 |
| | | | | t766095 | 476 |
| | | | WCIELLQAYWLVAD | t767109 | 440 |
| | | | (SEQ ID NO: 696) | t766740 | 454 |
| | | | WCIEWLQAFFLVAD | t766406 | 450 |
| | | | (SEQ ID NO: 697) | t766103 | 466 |
| | | | WCVELLQAYFLVAD | t766043 | 464 |
| | | | (SEQ ID NO: 698) | t766051 | 472 |
| CSWLV[VN]Q[AC]L | 264 | 279 | CSWLVVQALARATP | t766103 | 466 |
| [AQ][RI][AC][ST]P | | | EQ (SEQ ID NO: 700) | | |
| [ED]Q | | | | | |
| (SEQ ID NO: 699) | | | | | |

### Example 7: Functional Expression of Additional Chimeric PTs

[0587] To further improve the CBGA and CBGVA titer production of chimeric PTs, chimeric PTs from strains t523834 (SEQ ID NO: 114, corresponding to a CsPT1-CsPT4 chimera) and t524816 (SEQ ID NO: 116, corresponding to a CsPT4-CsPT7 chimera), described in Examples 1 and 2, were modified to include point mutations that were characterized in Example 1. The modified chimeric PTs were screened in a Gen 4 library.

[0588] Example 1 above describes the identification of 74 point mutations that improved CBGA production and 23 point mutations that improved CBGVA production. All 23 of the point mutations that improved CBGVA production also improved CBGA production. These mutations were ranked using a productivity score comprised of the sum of their CBGA and CBGVA titers normalized to those from a truncated CsPT4 (strain t612212: SEQ ID NO: 5). Subsets of the top hits of point mutations were selected for screening based on the ranked productivity score. Combinations of the selected point mutations were introduced into SEQ ID NO: 114 and SEQ ID NO: 116 to produce new chimeric PTs.

[0589] Point mutations in the chimeric PTs corresponding to SEQ ID NOs: 114 and 116 were generated at positions where the native residue in the chimera is the same as in CsPT4. For SEQ ID NO: 116, mutational loads between 2-4 mutations were generated by stacking all combinations of the top 8 ranked point-mutations, and all combinations of the top 11 ranked point-mutations where all inter-residue distances were greater than 6 Angstroms. For SEQ ID NO: 114, mutational loads of 9-10 mutations were generated by stacking all combinations of the top 15 ranked point-mutations, and all combinations of the top 23 ranked point-mutations where all inter-residue distances were greater that 6 Angstroms.

[0590] Protein sequences were recoded in silico for expression in S. cerevisiae and synthesized in the replicative yeast expression vector shown in FIG. 8. Each chimeric PT expression construct was transformed into an S. cerevisiae CEN.PK strain that was engineered to overproduce GPP. Strain t819232, comprising a fluorescent protein (RFP), was included in the library as a negative control. Strain t827885, expressing a chimeric PT corresponding to SEQ ID NO: 324 (the same chimeric PT expressed in strain t721639, except that it is not a fusion), was used as a positive control and for establishing hit ranking.

[0591] The Gen4 library was assayed for activity in a primary screen using a prenyltransferase assay which was conducted as follows: each thawed glycerol stock of PT transformants was stamped into a well of YPD (yeast extract peptone dextrose)+4% dextrose media. Samples were incubated at 30° C. in a shaking incubator for 2 days. A portion of each of the resulting cultures was stamped into a well of YEP (yeast extract+dextrose)+2% raffinose+2% galactose+1 mM olivetolic acid (C6). Samples were incubated at 30° C. in a shaking incubator for 4 days. A portion of each of the resulting production cultures was stamped into a well of PBS. Optical measurements were taken on a plate reader, with absorbance measured at 600 nm and fluorescence at 528 nm with 485 nm excitation. A portion of each of the production cultures was stamped into a well of 100% methanol in half-height deepwell plates. Plates were heat sealed and frozen. Samples were then thawed and spun down at 4° C. A portion of the supernatant was stamped into half-area 96 well plates. CBGA production in the samples was quantified via LC-MS by measuring relative peak areas. CBGA production was quantified in μg/L by comparing LC/MS peak areas to a standard curve for CBGA.

[0592] 112 chimeric PT variants were elevated to a secondary screen to verify their CBGAS activity and to further quantify the production of other cannabinoids. A total of 20 variants of the chimeric PT corresponding to SEQ ID NO: 116 and 23 variants of the chimeric PT corresponding to SEQ ID NO. 114 were carried over from the primary screen to the secondary screen. As shown in Table 11, the following point mutations were tested in the chimeric PTs, either alone or in combination: M43L, M87T, M87I, I86G, I86S, F82G, F151T, S119A, V122S, V122F, I86V, I86T, D94E, M87V, C31F, F151G, I147L, I86A, F245R, and F83Y were tested in the chimeric PT corresponding to SEQ ID NO: 116 and Q288R, M43L, F245W, F P145T, C31F, F245R, I86G, I86S, F82G, F145L, Q267, I147L, L311K, L311R, M43V, L311N, D94E, E113R, I86V, F145S, M87V, I86A, and I46C were tested in the chimeric PT corresponding to SEQ ID NO: 114.

[0593] In addition to screening for activity on olivetolic acid (C6), a parallel experiment was performed to screen the set of enzymes tested in the secondary screen on the C4 substrate divaric acid (DA), by substituting 1 mM divaric acid for the 1 mM olivetolic acid (OA) in the prenyltransferase assay described above. The resulting products, CBGA and cannabigerovarinic acid (CBGVA), were quantified in μg/L by comparing LC-MS peak areas to the respective standard curve for CBGA and CBGVA. See, Example 1. The experimental protocols for the secondary screen were the same as the assays used in primary screen except that both CBGA and CBGVA production were measured using LC-MS on four biological replicates incubated with OA or DA, respectively (FIG. 15, Table 11).

TABLE 11
Activity data of Gen 4 library members in S. cerevisiae

| | Strain type | | | Standard | | Standard |
|---|---|---|---|---|---|---|
| | PT type | Parent | Average | Deviation | Average | Deviation |
| | Mutation | chimera | CBGA | CBGA | CBGVA | CBGVA |
| Strain ID | (if applicable) | Strain | [μg/L] | [μg/L] | [μg/L] | [μg/L] |
| t827885 | Positive control | t721639 | 65297.254 | 12696.216 | 6507.709 | 716.085 |
| | chimeric PT | | | | | |
| t819232 | Negative control | N/A | 0 | 0 | 0 | 0 |
| t817911 | Library Chimera; C31F | t524816 | 96205 | 32827.12 | 34495.802 | 2161.756 |
| | F82G D94E F245R | | | | | |
| t817917 | Library Chimera, M43L | t524816 | 92043 | 29941.79 | 13117.368 | 1269.355 |
| | I86S I147L F245R | | | | | |
| t817954 | Library Chimera; C31F | t523834 | 100379.8 | 19850.32 | 136697.660 | 7865.282 |
| | M43V M87V D94E | | | | | |
| | E113R F145L F245W | | | | | |
| | Q267F Q288R | | | | | |
| t817955 | Library Chimera; C31F | t523834 | 109018 | 40816.12 | 131903.743 | 31952.635 |
| | M43L F82G D94E E113R | | | | | |
| | F145T F245R Q267F | | | | | |
| | Q288R | | | | | |
| t817960 | Library Chimera; M43L | t523834 | 113041.4 | 42038.45 | 104161.702 | 6220.732 |
| | F82G D94E E113R | | | | | |
| | F145S F245R Q267F | | | | | |
| | Q288R L311K | | | | | |
| t817962 | Library Chimera; C31F | t523834 | 139537.9 | 68090.21 | 51029.723 | 5570.915 |
| | M43V M87V D94E | | | | | |
| | E113R F245R Q267F | | | | | |
| | Q288R L311N | | | | | |
| t817963 | Library Chimera; I86A | t524816 | 93245.51 | 28187.41 | 19731.337 | 2071.111 |
| | D94E I147L F245R | | | | | |
| t817977 | Library Chimera; C31F | t523834 | 86621.15 | 25445.17 | 66671.475 | 5282.953 |
| | I46C I86A D94E E113R | | | | | |
| | F145T F245R Q267F | | | | | |
| | Q288R | | | | | |
| t817985 | Library Chimera; C31F | t523834 | 106164.5 | 19913.03 | 34201.160 | 876.195 |
| | M43V M87V D94E | | | | | |
| | F145T F245R Q267F | | | | | |
| | Q288R L311N | | | | | |
| t817996 | Library Chimera; C31F | t523834 | 132865.1 | 44482.93 | 106858.047 | 2103.630 |
| | I86G D94E E113R F145T | | | | | |
| | F245W Q267F Q288R | | | | | |
| | L311N | | | | | |
| t818002 | Library Chimera; I86V | t524816 | 105606.3 | 28247.86 | 9766.031 | 1161.223 |
| | F245R | | | | | |
| t818007 | Library Chimera; C31F | t523834 | 79588.36 | 27299.71 | 61287.525 | 11879.118 |
| | I46C I86G D94E E113R | | | | | |
| | F245R Q267F Q288R | | | | | |
| | L311N | | | | | |
| t818009 | Library Chimera; C31F | t523834 | 95077.48 | 21940.2 | 80236.181 | 12882.087 |
| | M43V M87V D94E | | | | | |
| | E113R F145L F245R | | | | | |
| | Q288R L311R | | | | | |
| t818014 | Library Chimera; C31F | t524816 | 157958.3 | 60683.91 | 16825.813 | 1271.625 |
| | M43L I86A I147L | | | | | |
| t818015 | Library Chimera; I86S | t524816 | 64426.3 | 10734.56 | 8455.435 | 1500.672 |
| | D94E F245R | | | | | |
| t818033 | Library Chimera; C31F | t523834 | 94781.41 | 27521.67 | 81666.892 | 2215.417 |
| | M43L I86S D94E E113R | | | | | |
| | F145S F245R Q267F | | | | | |
| | L311K | | | | | |
| t818043 | Library Chimera; C31F | t524816 | 118537.3 | 18987.01 | 11397.707 | 1038.077 |
| | M43L I86V D94E | | | | | |
| t818044 | Library Chimera; C31F | t523834 | 119012.7 | 45314.1 | 58929.539 | 39289.466 |
| | I46C F82G D94E E113R | | | | | |
| | I147L Q267F Q288R | | | | | |
| | L311N | | | | | |
| t818058 | Library Chimera; C31F | t524816 | 69877.66 | 24545.27 | 12600.668 | 48.783 |
| | M43L I86A F245R | | | | | |
| t818067 | Library Chimera; C31F | t524816 | 58799.62 | 12325.36 | 8842.980 | 658.628 |
| | I86A F245R | | | | | |
| t818093 | Library Chimera; C31F | t523834 | 111724.4 | 24758.13 | 86022.676 | 7682.185 |
| | M43L I86S E113R F145L | | | | | |
| | F245R Q267F Q288R | | | | | |
| | L311R | | | | | |
| t818098 | Library Chimera; C31F | t523834 | 94659.97 | 32406.3 | 47879.602 | 2438.941 |
| | I46C M87V D94E E113R | | | | | |
| | F145L Q267F Q288R | | | | | |
| | L311N | | | | | |
| t818130 | Library Chimera; I86S | t524816 | 68599.8 | 21345.91 | 8936.075 | 364.916 |
| | D94E | | | | | |
| t818140 | Library Chimera; 186T | t524816 | 63747.82 | 25619.76 | 6121.095 | 630.620 |
| | M87I F151T | | | | | |
| t818171 | Library Chimera; M43L | t524816 | 95177.7 | 27671.48 | 8571.350 | 1915.307 |
| | I86S D94E | | | | | |
| t818180 | Library Chimera; F83Y | t524816 | 87390.44 | 32825.62 | 10826.062 | 311.695 |
| | I86A M87T | | | | | |
| t818195 | Library Chimera; C31F | t523834 | 87593.61 | 26092.39 | 59658.404 | 9742.367 |
| | M43L F82G I86G D94E | | | | | |
| | L311N | | | | | |
| | F145L 1147L F245R | | | | | |
| | L311N | | | | | |
| t818196 | Library Chimera; I86V | t524816 | 46874.88 | 11423.02 | 7766.267 | 631.558 |
| | M87T | | | | | |
| t818198 | Library Chimera: I86V | t524816 | 61359.01 | 28412.76 | 10611.003 | 3223.715 |
| | I147L F245R | | | | | |
| t818205 | Library Chimera; C31F | t524816 | 65670.66 | 9344.088 | 14609.435 | 1883.339 |
| | I86V D94E I147L | | | | | |
| t818206 | Library Chimera; C31F | t523834 | 59764.32 | 11215.17 | 91106.141 | 4284.420 |
| | I46C I86A E113R 1147L | | | | | |
| | F245W Q267F Q288R | | | | | |
| | L311N | | | | | |
| t818207 | Library Chimera: I86A | t524816 | 87654.22 | 23691.22 | 16726.277 | 897.206 |
| | M87I | | | | | |
| t818208 | Library Chimera; C31F | t523834 | 61943.88 | 27862.96 | 96611.578 | 9790.778 |
| | M43L I86A D94E E113R | | | | | |
| | F145S F245R Q267F | | | | | |
| | L311K | | | | | |
| t818210 | Library Chimera; C31F | t523834 | 105308.1 | 25589.21 | 129878.457 | 7239.716 |
| | M43L I86G D94E E113R | | | | | |
| | F145L F245R Q288R | | | | | |
| | L311R | | | | | |
| t818214 | Library Chimera; M43L | t524816 | 78738.16 | 9345.376 | 16374.522 | 1160.505 |
| | I86A D94E | | | | | |
| t818215 | Library Chimera; C31F | t523834 | 110533.7 | 18237.31 | 90748.824 | 14334.815 |
| | I46C I86G D94E E113R | | | | | |
| | F145L F245R Q288R | | | | | |
| | L311N | | | | | |
| t818223 | Library Chimera; C31F | t523834 | 94254.93 | 17979.98 | 75788.092 | 3482.879 |
| | M43V I86G E113R | | | | | |
| | F145L F245R Q267F | | | | | |
| | Q288R L311K | | | | | |
| t818230 | Library Chimera; C31F | t523834 | 84126.01 | 18011.56 | 89495.046 | 17265.633 |
| | F82G 186V M87V D94E | | | | | |
| | F145L 1147L F245R | | | | | |
| | L311K | | | | | |
| t818247 | Library Chimera; I86A | t524816 | 85367.09 | 16396.53 | 18065.417 | 2836.827 |
| | D94E I147L | | | | | |
| t818248 | Library Chimera; I86A | t524816 | 88500.44 | 24359.6 | 15341.923 | 927.223 |
| | D94E | | | | | |
| t818257 | Library Chimera; F83Y | t524816 | 101846.9 | 12313.55 | 15222.154 | 1308.820 |
| | I86A M87I F151T | | | | | |
| t818260 | Library Chimera; I86A | t524816 | 117133.9 | 18461.13 | 16851.578 | 2742.636 |
| | M87V S119A F151G | | | | | |
| t818375 | Library Chimera; I86A | t524816 | 90544.21 | 48006.38 | 16023.666 | 5181.576 |
| | S119A | | | | | |
| t818379 | Library Chimera; M43L | t524816 | 114207.3 | 9725.586 | 15945.918 | 1449.010 |
| | I86S M87V | | | | | |
| t818383 | Library Chimera; I86T | t524816 | 60717.56 | 7243.179 | 3843.038 | 498.596 |
| | S119A F151T | | | | | |
| t818388 | Library Chimera; C31F | t524816 | 109365.3 | 14620.93 | 31591.201 | 4161.662 |
| | F82G | | | | | |
| t818392 | Library Chimera; C31F | t524816 | 60222.61 | 6829.267 | 14529.480 | 1420.716 |
| | M43L I86A D94E | | | | | |
| t818408 | Library Chimera; C31F | t524816 | 100345.2 | 5771.459 | 11121.141 | 1825.115 |
| | I86V D94E | | | | | |
| t818426 | Library Chimera; I86G | t524816 | 12698.72 | 2569.555 | 30318.849 | 1879.873 |
| | F245R | | | | | |
| t818427 | Library Chimera; M43L | t524816 | 11479.94 | 2355.54 | 7636.819 | 1404.282 |
| | I86S F245R | | | | | |
| t818547 | Library Chimera; I86T | t524816 | 85918.24 | 21144.45 | 8369.546 | 2048.626 |
| | M87T | | | | | |
| t818555 | Library Chimera; C31F | t523834 | 87176.65 | 22239.93 | 154370.365 | 17278.608 |
| | M43L I86A D94E E113R | | | | | |
| | I147L F245R Q267F | | | | | |
| | Q288R | | | | | |
| t818565 | Library Chimera; C31F | t523834 | 145825.9 | 51826.35 | 128554.450 | 24145.052 |
| | M43L I86V M87V D94E | | | | | |
| | F145L 1147L F245R | | | | | |
| | L311N | | | | | |
| t818573 | Library Chimera; C31F | t523834 | 117621.2 | 13190.54 | 89583.345 | 11087.193 |
| | M43L I86S M87V D94E | | | | | |
| | F145L 1147L F245R | | | | | |
| | L311K | | | | | |
| t818606 | Library Chimera; C31F | t523834 | 105800.5 | 11058.4 | 55729.409 | 4889.757 |
| | I46C F82G D94E E113R | | | | | |
| | F145L Q267F Q288R | | | | | |
| | L311N | | | | | |
| t818614 | Library Chimera; I86G | t524816 | 96490.61 | 12045.81 | 22687.205 | 992.142 |
| | D94E | | | | | |
| t818626 | Library Chimera; F82G | t524816 | 91035.18 | 6848.612 | 15793.979 | 867.994 |
| | V122F | | | | | |
| t818726 | Library Chimera; C31F | t523834 | 80961.28 | 74786.05 | 96275.047 | 11643.525 |
| | M43L F82G E113R | | | | | |
| | F145S F245R Q267F | | | | | |
| | Q288R L311R | | | | | |
| t818728 | Library Chimera; C31F | t523834 | 92194.67 | 9002.436 | 67336.939 | 41237.172 |
| | M43L I86S D94E E113R | | | | | |
| | F245R Q267F Q288R | | | | | |
| | L311K | | | | | |
| t818733 | Library Chimera; C31F | t523834 | 134028.9 | 9997.258 | 39318.704 | 5920.956 |
| | M43V M87V D94E | | | | | |
| | E113R F145T F245R | | | | | |
| | Q267F L311N | | | | | |
| t818738 | Library Chimera; C31F | t523834 | 12124.77 | 1942.756 | 104396.291 | 6226.342 |
| | F82G I86V M87V D94E | | | | | |
| | F145L I147L F245R | | | | | |
| | L311N | | | | | |
| t818739 | Library Chimera; C31F | t524816 | 54867.49 | 56826.87 | 10515.517 | 926.653 |
| | I86A D94E F245R | | | | | |
| t818742 | Library Chimera; I46C | t523834 | 134979 | 12945.05 | 65057.841 | 7262.812 |
| | F82G D94E E113R I147L | | | | | |
| | F245R Q267F Q288R | | | | | |
| | L311N | | | | | |
| t818743 | Library Chimera; C31F | t523834 | 100259.9 | 10232.15 | 53725.636 | 6423.225 |
| | M43L I86G M87V D94E | | | | | |
| | F145L I147L F245R | | | | | |
| | L311N | | | | | |
| t818744 | Library Chimera; M43L | t523834 | 178286.7 | 33634.01 | 105939.535 | 35272.096 |
| | I86A D94E E113R 1147L | | | | | |
| | F245R Q267F Q288R | | | | | |
| | L311N | | | | | |
| t818745 | Library Chimera; M43L | t524816 | 113033.8 | 22100.38 | 9102.830 | 1025.283 |
| | I86S | | | | | |
| t818758 | Library Chimera; M43L | t523834 | 151737.1 | 20071.94 | 82124.224 | 11849.533 |
| | F82G I86V M87V D94E | | | | | |
| | F145L I147L F245R | | | | | |
| | L311N | | | | | |
| t818759 | Library Chimera; C31F | t524816 | 85907.68 | 4676.471 | 12100.114 | 1286.633 |
| | I86V M87V | | | | | |
| t818763 | Library Chimera: I86G | t524816 | 85954.37 | 5347.524 | 16587.503 | 1649.829 |
| | V122S | | | | | |
| t818767 | Library Chimera; C31F | t523834 | 133839.5 | 20240.97 | 86377.390 | 9845.302 |
| | M43V F82G D94E | | | | | |
| | E113R F145S F245R | | | | | |
| | Q288R L311R | | | | | |
| t818770 | Library Chimera; C31F | t523834 | 170289.3 | 15901.92 | 95481.050 | 7697.973 |
| | M43L F82G D94E E113R | | | | | |
| | F145T F245R Q267F | | | | | |
| | L311N | | | | | |
| t818772 | Library Chimera; F83Y | t524816 | 146497 | 55243.54 | 9870.588 | 1939.730 |
| | I86T M87V | | | | | |
| t818781 | Library Chimera; I86G | t524816 | 58488.96 | 60757 | 12716.431 | 201.102 |
| | M87I | | | | | |
| t818786 | Library Chimera; C31F | t524816 | 93999.79 | 14635.79 | 43201.330 | 6680.789 |
| | F82G D94E I147L | | | | | |
| t818801 | Library Chimera; F83Y | t524816 | 137288.7 | 7852.222 | 19269.023 | 2157.093 |
| | I86S M87I F151T | | | | | |
| t818804 | Library Chimera; I86A | t524816 | 85313.6 | 12665.81 | 11171.684 | 1479.019 |
| | V122S | | | | | |
| t818805 | Library Chimera; I86T | t524816 | 152249.5 | 21654.77 | 5986.563 | 627.624 |
| | S119A | | | | | |
| t818806 | Library Chimera; C31F | t523834 | 89754.48 | 8341.692 | 50259.419 | 43670.467 |
| | I46C I86A D94E E113R | | | | | |
| | I147L Q267F Q288R | | | | | |
| | L311N | | | | | |
| t818810 | Library Chimera; C31F | t523834 | 145327.7 | 52449.11 | 60175.267 | 9573.993 |
| | I46C I86S D94E E113R | | | | | |
| | I147L F245R Q288R | | | | | |
| | L311R | | | | | |
| t818836 | Library Chimera; C31F | t523834 | 117405.2 | 14389.15 | 45597.093 | 4833.547 |
| | I46C M87V D94E E113R | | | | | |
| | F145T F245R Q288R | | | | | |
| | L311R | | | | | |
| t818843 | Library Chimera; C31F | t523834 | 112285.1 | 23074.45 | 87794.850 | 4324.295 |
| | F82G I86V M87V D94E | | | | | |
| | F145L I147L F245R | | | | | |
| | L311R | | | | | |
| t818844 | Library Chimera; M43L | t524816 | 103534.1 | 29134.34 | 17960.347 | 2264.724 |
| | I147L F245R | | | | | |
| t818877 | Library Chimera; F83Y | t524816 | 134547.1 | 57137.76 | 6444.313 | 2470.421 |
| | I86A M87T F151T | | | | | |
| t818880 | Library Chimera; I86A | t524816 | 136959.1 | 54340.33 | 20912.700 | 2369.053 |
| | M87V I147L | | | | | |
| t818893 | Library Chimera: I86V | t524816 | 113641.7 | 28978.84 | 11482.957 | 1630.415 |
| | M87T S119A | | | | | |
| t818902 | Library Chimera; F83Y | t524816 | 86845 | 5214.612 | 15234.672 | 2019.525 |
| | I86G F151T | | | | | |
| t81891 | Library Chimera; C31F | t524816 | 134217.9 | 20833.8 | 8572.731 | 1660.680 |
| | I86V D94E F245R | | | | | |
| t818922 | Library Chimera; F82G | t524816 | 130625.1 | 60046.68 | 17853.565 | 1816.667 |
| | F245R | | | | | |
| t818975 | Library Chimera; C31F | t523834 | 145649 | 10805.58 | 80375.540 | 11429.056 |
| | M43L F82G I86V D94E | | | | | |
| | F145L 1147L F245R | | | | | |
| | L311N | | | | | |
| t818980 | Library Chimera: F82G | t524816 | 103590.1 | 15074.63 | 46502.938 | 16492.434 |
| | D94E I147L | | | | | |
| t818982 | Library Chimera; C31F | t523834 | 109349.8 | 35122.57 | 74404.043 | 10322.270 |
| | M43L I86S M87V D94E | | | | | |
| | F145L 1147L F245R | | | | | |
| | L311R | | | | | |
| t818989 | Library Chimera; C31F | t523834 | 8701.955 | 1934.449 | 88733.262 | 21711.018 |
| | M43L I86G D94E E113R | | | | | |
| | F145S Q267F Q288R | | | | | |
| | L311N | | | | | |
| t819008 | Library Chimera; I86G | t524816 | 105827.3 | 3458.263 | 19807.781 | 640.441 |
| | D94E I147L F245R | | | | | |
| t819030 | Library Chimera; C31F | t523834 | 90598.75 | 6558.066 | 88458.076 | 19104.811 |
| | M43L I86S M87V D94E | | | | | |
| | F145L I147L F245R | | | | | |
| | L311N | | | | | |
| t819037 | Library Chimera; F83Y | t524816 | 121600 | 42042.81 | 14336.611 | 2896.208 |
| | I86S M87V F151T | | | | | |
| t819066 | Library Chimera; I86V | t524816 | 90480.64 | 3791.432 | 10364.688 | 695.025 |
| | M87I S119A F151T | | | | | |
| t819073 | Library Chimera; M43L | t524816 | 93001.93 | 6946.516 | 20567.543 | 2748.245 |
| | I86G D94E F245R | | | | | |
| t819074 | Library Chimera; F82G | t524816 | 80104.1 | 10936.4 | 14410.497 | 1834.672 |
| | I86T V122F | | | | | |
| t819122 | Library Chimera; C31F | t523834 | 96685.34 | 111703.7 | 62813.484 | 43965.335 |
| | M87V D94E E113R | | | | | |
| | F145T F245W Q267F | | | | | |
| | Q288R L311K | | | | | |
| t819126 | Library Chimera; C31F | t523834 | 37748.66 | 43742.31 | 109992.287 | 19110.958 |
| | M43V D94E E113R | | | | | |
| | I147L F245W Q267F | | | | | |
| | Q288R L311R | | | | | |
| t819132 | Library Chimera; M43L | t523834 | 200736.2 | 107694.8 | 129066.626 | 23068.776 |
| | F82G D94E E113R I147L | | | | | |
| | F245R Q267F Q288R | | | | | |
| | L311K | | | | | |
| t819161 | Library Chimera; C31F | t524816 | 202538 | 112038.9 | 10264.084 | 3433.508 |
| | M43L I86S D94E | | | | | |
| t819169 | Library Chimera; C31F | t524816 | 93841.47 | 7649.135 | 42149.871 | 4422.194 |
| | F82G I147L | | | | | |
| t819172 | Library Chimera; C31F | t524816 | 94967.7 | 15345.72 | 35702.271 | 3062.617 |
| | F82G D94E | | | | | |
| t819173 | Library Chimera; C31F | t524816 | 149775.2 | 50333.67 | 7368.217 | 1854.777 |
| | M43L D94E F245R | | | | | |
| t819179 | Library Chimera; I86A | t524816 | 93595.48 | 6178.192 | 25443.790 | 3084.082 |
| | M87V | | | | | |
| t819193 | Library Chimera; I86T | t524816 | 78764.49 | 6879.207 | 4262.752 | 476.775 |
| | M87V F151G | | | | | |
| t819225 | Library Chimera; C31F | t524816 | 80286.85 | 7944.894 | 17149.563 | 4138.798 |
| | I86V M87V I147L | | | | | |
| t819336 | Library Chimera; C31F | t523834 | 96293.33 | 22287.83 | 32895.116 | 13535.689 |
| | I46C I86S D94E F145S | | | | | |
| | F245W Q267F Q288R | | | | | |
| | L311R | | | | | |
| t819343 | Library Chimera; C31F | t523834 | 159495 | 26555.01 | 58263.719 | 6555.215 |
| | I46C I86A D94E I147L | | | | | |
| | F245R Q267F Q288R | | | | | |
| | L311K | | | | | |
| t819372 | Library Chimera; C31F | t523834 | 159729.9 | 23659.25 | 84059.141 | 10331.573 |
| | M43V M87V D94E | | | | | |
| | E113R F145S Q267F | | | | | |
| | Q288R L311R | | | | | |
| t819375 | Library Chimera; I86V | t524816 | 100660.6 | 20554.36 | 13991.775 | 2219.405 |
| | D94E I147L F245R | | | | | |

[0594] All strains tested in the Gen 4 library produced more CBGA in the presence of olivetolic acid or more CBGVA in the presence of divaric acid than strain t827885, except for the following strains, as shown in Table 11: t818015, t818067, t818140, t818198, t818206, t818208, t818383, t818392, t818426, t818427, t818739, t818781, and t819126 for CBGA, and t818140, t818383, t818805, t818877, and t819193 for CBGVA.

[0595] Some strains, e.g., t818140 (including amino acid substitutions 186T, M87I and F151T) and t818383 (including amino acid substitutions 186T, S119A and F151T) produced lower titers of both CBGA and CBGVA.

[0596] Some strains, e.g., t819126 (including amino acid substitutions C31F, M43V. D94E, E113R, I147L, F245W, Q267F, Q288R and L311R), t818738 (including amino acid substitutions C31F, F82G, I86V, M87V, D94E, F145L, I147L, F245R and L311N), t818208 (including amino acid substitutions C31F, M43L, I86A, D94E, E113R, F145S, F245R, Q267F and L311K), t818206 (including amino acid substitutions C31F, I46C, 186A, E113R, I147L, F245W, Q267F, Q288R and L311N), t818989 (including amino acid substitutions C31F, M43L, I86G, D94E, E113R, F145S, Q267F, Q288R and L311N), t818426 (including amino acid substitutions I86G and F245R) and t818392 (including amino acid substitutions C31F, M43L, I86A and D94E) produced a decreased amount of CBGA and an increased amount of CBGVA, while other strains, e.g., t818805 (including amino acid substitutions 186T and S119A) and t818877 (including amino acid substitutions F83Y, I86A, M87T and F151T) produced a decreased amount of CBGVA and an increased amount of CBGA, suggesting that some substitutions may alter substrate/product specificity.

[0597] 24 strains (21%) demonstrated CBGA titers greater than two-fold higher than that produced by strain t827885 when cultured in the presence of olivetolic acid, whereas 83 strains (74%) demonstrated CBGVA titers greater than two-fold higher than that produced by strain t827885 in the presence of divaric acid.

[0598] The following strains produced both CBGA titers and CBGVA titers greater than two-fold higher than strain t827885: (1) strain t817962, which was based on the chimeric PT sequence within strain t523834 (SEQ ID NO: 114) described in Examples 1 and 2, and further contained C31F, M43V, M87V, D94E, E113R, F245R, Q267F, Q288R, and L311N substitutions; (2) strain t817996, which was based on the chimeric PT sequence within strain t523834 (SEQ ID NO: 114) described in Examples 1 and 2, and further contained C31F, I86G, D94E, E113R, F145T, F245W, Q267F, Q288R, and L311N substitutions; (3) strain t818014, which was based on the chimeric PT sequence within strain t524816 (SEQ ID NO: 116) described in Examples 1 and 2, and further contained C31F, I86G, D94E, E113R, F145T, F245W, Q267F, Q288R, and L311N substitutions; (4) strain t818565, which was based on the chimeric PT sequence within strain t523834 (SEQ ID NO: 114) described in Examples 1 and 2, and further contained C31F, M43L, I86V, M87V, D94E, F145L, I147L, F245R, and L311N substitutions; (5) strain t818733, which was based on the chimeric PT sequence within strain t523834 (SEQ ID NO: 114) described in Examples 1 and 2, and further contained C31F, M43V, M87V, D94E, E113R, F145T, F245R, Q267F, and L311N substitutions; (6) strain t818744, which was based on the chimeric PT sequence within strain t523834 (SEQ ID NO: 114) described in Examples 1 and 2, and further contained M43L, I86A, D94E, E113R, I147L, F245R, Q267F, Q288R, and L311N substitutions; (7) strain t818758, which was based on the chimeric PT sequences within strain t523834 (SEQ ID NO: 114) described in Examples 1 and 2, and further contained M43L, F82G, I86V, M87V, D94E, F145L, I147L, F245R, and L311N substitutions; (8) strain t818767, which was based on the chimeric PT sequence within strain t523834 (SEQ ID NO: 114) described in Examples 1 and 2, and further contained C311F, M43V. F82G, D94E, E113R, F145S, F245R, Q288R, and L311R substitutions; (9) strain t818770, which was based on the chimeric PT sequence within strain t523834 (SEQ ID NO: 114) described in Examples 1 and 2, and further contained C31F, M43L, F82G, D94E, E113R, F145T, F245R, Q267F, and L311N substitutions; (10) strain t818801, which was based on the chimeric PT sequence within strain t524816 (SEQ ID NO: 116) described in Examples 1 and 2, and further contained F83Y, I86S, M87I, and F151T substitutions; (11) strain t818810, which was based on the chimeric PT sequence within strain t523834 (SEQ ID NO: 114) described in Examples 1 and 2, and further contained C31 F, I46C, I86S, D94E, E113R, I147L, F245R, Q288R, and L311R substitutions; (12) strain t818880, which was based on the chimeric PT sequence within strain t524816 (SEQ ID NO: 116) described in Examples 1 and 2, and further contained 186A, M87V, and I147L substitutions; (13) strain t818742, which was based on the chimeric PT sequence within strain t523834 (SEQ ID NO: 114) described in Examples 1 and 2, and further contained I46C, F82G, D94E, E113R, I147L, F245R, Q267F, Q288R and L311N substitutions; (14) strain t818922, which was based on the chimeric PT sequence within strain t524816 (SEQ ID NO: 116) described in Examples 1 and 2, and further contained F82G and F245R substitutions; (15) strain t818975, which was based on the chimeric PT sequence within strain t523834 (SEQ ID NO: 114) described in Examples 1 and 2, and further contained C31F, M43L, F82G, I86V, D94E, F145L, I147L, F245R and L311N substitutions; (16) strain t819132, which was based on the chimeric PT sequence within strain t523834 (SEQ ID NO: 114) described in Examples 1 and 2, and further contained M43L, F82G, D94E, E113R, I147L, F245R, Q267F, Q288R and L311K substitutions; (17) strain t819343, which was based on the chimeric PT sequence within strain t523834 (SEQ ID NO: 114) described in Examples 1 and 2, and further contained C31F, I46C, I86A, D94E, I147L, F245R, Q267F, Q288R and L311K substitutions; and (18) strain t819372, which was based on the chimeric PT sequence within strain t523834 (SEQ ID NO: 114) described in Examples 1 and 2, and further contained C31F, M43V, M87V, D94E, E113R, F145S, Q267F, Q288R, and L311R substitutions. Overall, variants of SEQ ID NO: 114, which is a chimera of CsPT1 and CsPT4 produced higher CBGVA titers than variants of SEQ ID NO: 116, which is a chimera of CsPT4 and CsPT7 (FIG. 15B). Sequence information for strains described in this Example is provided in Table 19.

### Example 8: Functional Expression of Additional Chimeric PTs

[0599] To further improve the CBGA titer of chimeric PTs, several of the top CBGA and/or CBGVA producing strains from the Gen 4 library described in Example 7 were selected. Additional point mutations were introduced into the chimeric PTs expressed in these strains to generate a Gen 5 library. The strains selected from the Gen 4 library were: strain t818980 (corresponding to a CsPT4-CsPT7 chimera based on parent chimera strain t524816) and strains t819132, t818744, t818565, t818555, and t817954 (corresponding to CsPT1-CsPT4 chimeras based on parent chimera strain t523834). The number of additional mutations applied to the Gen 4 templates to produce the Gen 5 PT variants ranged from 1 to 16 point mutations. The modified chimeric PTs were screened in a Gen 5 library.

[0600] Protein sequences were recoded in silico for expression in S. cerevisiae and synthesized in the replicative yeast expression vector shown in FIG. 8. Each chimeric PT expression construct was transformed into an S. cerevisiae CEN.PK strain that was engineered to overproduce GPP. Strain t819140, comprising a fluorescent protein (RFP), was included in the library as a negative control. Strain t818980, expressing one of the best-performing CsPT4-CsPT7 chimeras in the Gen 4 library, and strain t819132, expressing one of the best-performing CsPT1-CsPT4 chimeras in the Gen 4 library, were used as positive controls and for establishing hit ranking.

[0601] The Gen 5 library was assayed for activity in a primary screen using the same assay described in Example 7. 100 chimeric PT variants were elevated to a secondary screen to verify their CBGAS activity and to further quantify the production of CBGA. Table 12 and FIG. 16 show the results of the Gen 5 library screen. Sequences of the chimeric PTs are provided in Table 20.

[0602] As shown in Table 12, the following point mutations were tested in PT chimeras based on parent chimera strain t524816 (corresponding to a CsPT4-CsPT7 chimera): V39T, L62I, L68F, M75I, M75V, F82G, I86G, D94E, I117L, I140L, I140T, I147L, F151I, A152I, I172F, I172L, G177L, F190V, M196I, M196L, P199A, L204I, V209L, M212I, T213V, A227K, A227R, V231I, V234F, V234L, R241K, V2461, V246L, V247S, V250A, V250I, V250T, T254A, T254C, T254L, T254N, S257G, L260I, A262G, I264F, L275I, and C284W.

[0603] As also shown in Table 12, the following point mutations were tested in PT chimeras based on parent chimera strain t523834: T30A, C31F, L34F, Q35A, Q35S, Q35T, V39T, V401, M43L, M43V, S45F, S451, S45L, I46A, I46C, I46G, A47S, G49A, G49C, G49I, G49S, G52A, S63N, F72A, F72Q, F72V, A73G, V75I, P76A, S79C, S79L, F82A, F82G, A85N, I86A, I86G, I86V, M87I, M87L, M87V, D94E, D102Y, L105I, V106A, M110I, M110L, E113R, L118I, I121S, L124V, I128L, V129I, V129L, F139A, F139I, F139L, V140F, V140I, V140L, V140T, F141A, F141C, F141G, F141I, F141S, F141V, I142L, F145L, I147L, F148L, A149I, A149L, F151A, F151T, A152F, A152I, A152L, A152V, N167A, L169A, L169I, T171I, I172F, I172L, I172V, S173I, S173L, S173T, S174V, G177I, G177L, G177T, G177V, A179N, A179P, T181V, S182F, S182V, R197S, F200L, I204T, M207V, V209L, M210F, G211A, G211S, G211T, M212I, M212L, T213A, T213G, T213V, F216I, A217T, I220L, I223V, A227K, A227R, K228A, Y229F, Y229H, V231I, V234F, V234L, V234M, T236A, T236V, A240V, R241K, N242T, M243A, M2431, M243S, M243T, F245R, F245W, V246A, V246F, V2461, V246L, V247C, V247G, V250F, V250I, V250L, L252I, L256V, V257G, V257L, S258A, I264F, I264N, Q267F, S271G, S271K, S271L, L276F, L276G, L276P, A2791, L281A, F283S, C284F, C284I, C284S, C284V, C284W, I286F, Q288R, T289A, L311K, and L311N.

[0604] 21 strains (21%) demonstrated CBGA titers greater than that produced by positive control strains t818980 and/or 1819132 when cultured in the presence of olivetolic acid. 21 strains (21%; 3 CsPT1-CsPT4 PT chimeras and 18 CsPT4-CsPT7 PT chimeras) in the Gen 5 library produced higher CBGA titers than strain t819132, one of the best performing CsPT1-CsPT4 PT chimeras in the Gen 4 library. 16 strains (16%; 2 CsPT1-CsPT4 PT chimeras and 14 CsPT4-CsPT7 chimeras) in the Gen 5 library produced higher CBGA titers than strain t818980, one of the best performing CsPT4-CsPT7 PT chimeras in the Gen 4 library.

[0605] The following strains produced CBGA titers 10% higher than the best Gen 4 strain t818980: (1) strain t879474, which is based on the CsPT4-CsPT7 chimeric PT sequence within strain t524816, and further contained the amino acid substitutions M75V, F82G, D94E, I147L and T254N; (2) strain t879304, which is also based on the CsPT4-CsPT7 chimeric PT sequence within strain t524816, and further contained the amino acid substitutions F82G, D94E, I140L and I147L; (3) strain t879340, which is also based on the CsPT4-CsPT7 chimeric PT sequence within strain t524816, and further contained the amino acid substitutions F82G, D94E, I147L, A227K and T254N; (4) strain t879750, which is based on the CsPT4-CsPT7 chimeric PT sequence within strain t524816, and further contained the amino acid substitutions L62I F82G D94E I147L; (5) strain t879685, which is based on the CsPT4-CsPT7 chimeric PT sequence within strain t524816, and further contained the amino acid substitutions L68F F82G D94E I147L; (6) strain t879725, which is based on the CsPT4-CsPT7 chimeric PT sequence within strain t524816, and further contained the amino acid substitutions F82G D94E I147L M196L; and (7) strain t879774, which is based on the CsPT4-CsPT7 chimeric PT sequence within strain t524816, and further contained the amino acid substitutions F82G D94E I147L M196I.

[0606] The following CsPT1-CsPT4 chimera variant strains produced higher CBGA titers than the best Gen 4 strain t818980; (1) strain t879592, which is based on the CsPT1-CsPT4 chimeric PT sequence within strain t523834, and further contained amino acid substitutions L34F, Q35T, M43L, G49S, I86A, D94E, D102Y, E113R, F139L, I147L, A149L, S182V, T213V, A227R, V234L, T236V, F245R, V247G, V250L, L256V, V257G, Q267F, F283S, Q288R, L311N; and (2) strain t879357, which is based on the CsPT1-CsPT4 chimera template sequence within strain t523834, and further contained the amino acid substitutions M43L, F82G, A85N, I86G, M87I, D94E, V106A, E113R, F141S, I142L. I147L, A149L, T171I, A179N, A227K, Y229H, V234L, R241K, F245R, V250F, V257L, S258A, Q267F, Q288R and L311K.

[0607] The following CsPT4-CsPT7 chimera variant strains produced higher CBGA titers than the Gen 4 strain t819132: (1) strain t879001, which is based on the CsPT4-CsPT7 chimera PT sequence within strain t523834, and further contained amino acid substitutions F82G D94E I140T I147L; (2) strain t879340, which is based on the CsPT4-CsPT7 chimera PT sequence within strain t523834, and further contained amino acid substitutions F82G D94E I147L A227K T254N; (3) strain t879474, which is based on the CsPT4-CsPT7 chimera PT sequence within strain t523834, and further contained amino acid substitutions M75V F82G D94E I147L T254N; (4) strain t879750, which is based on the CsPT4-CsPT7 chimera PT sequence within strain t523834, and further contained amino acid substitutions L62I F82G D94E I147L; (5) strain t879685, which is based on the CsPT4-CsPT7 chimera PT sequence within strain t523834, and further contained amino acid substitutions L68F F82G D94E I147L; (6) strain t879670, which is based on the CsPT4-CsPT7 chimera PT sequence within strain t523834, and further contained amino acid substitutions F82G D94E I147L I172L; (7) strain t879624, which is based on the CsPT4-CsPT7 chimera PT sequence within strain t523834, and further contained amino acid substitutions F82G D94E I147L V250I T254N; (8) strain t879758, which is based on the CsPT4-CsPT7 chimera PT sequence within strain t523834, and further contained amino acid substitutions F82G D94E I147L R241K; (9) strain t879725, which is based on the CsPT4-CsPT7 chimera PT sequence within strain t523834, and further contained amino acid substitutions F82G D94E I147L M196L; (10) strain t879768, which is based on the CsPT4-CsPT7 chimera PT sequence within strain t523834, and further contained amino acid substitutions F82G D94E I147L C284W; (11) strain t879304, which is based on the CsPT4-CsPT7 chimera PT sequence within strain t523834, and further contained amino acid substitutions F82G D94E I140L I147L; (12) strain t879151, which is based on the CsPT4-CsPT7 chimera PT sequence within strain t523834, and further contained amino acid substitutions F82G D94E I147L V250A T254N; (13) strain t879774, which is based on the CsPT4-CsPT7 chimera PT sequence within strain t523834, and further contained amino acid substitutions F82G D94E I147L M196I; (14) strain t879949, which is based on the CsPT4-CsPT7 chimera PT sequence within strain t523834, and further contained amino acid substitutions F82G D94E I147L V246I; (15) strain t879660, which is based on the CsPT4-CsPT7 chimera PT sequence within strain t523834, and further contained amino acid substitutions F82G D94E I147L T254A; (16) strain t879522, which is based on the CsPT4-CsPT7 chimera PT sequence within strain t523834, and further contained amino acid substitutions M75V F82G D94E I147L; (17) strain t879240, which is based on the CsPT4-CsPT7 chimera PT sequence within strain t523834, and further contained amino acid substitutions F82G D94E I147L T254C; and (18) strain t879205, which is based on the CsPT4-CsPT7 chimera PT sequence within strain t523834, and further contained amino acid substitutions F82G D94E I147L F190V.

[0608] Based on the data from the Gen 5 library, at least the following amino acid substitutions appeared to contribute to improving CBGA titers within the PT chimeras: F82G, D94E, I147L, T254N, I140L, and A227K. Homology modeling analysis was performed to investigate the potential effects of amino acid substitutions at these positions.

[0609] The three-dimensional conformational structure of transmembrane PT proteins corresponds to a helical bundle that includes nine transmembrane helices. Without wishing to be bound by any theory, amino acid position 82 is located on the second transmembrane helix of the nine transmembrane helical bundle of the PT structure. Specifically, position 82 is situated on the face of transmembrane helix 2 that apposes the putative enzymatic active site. The amino acid in position 82 may affect the overall helical bundle structure of the PT protein through contacts with neighboring transmembrane helix 1 and transmembrane helix 3. Transmembrane helix 1 faces the active site, so contact with transmembrane helix 1 may affect active site shape. Transmembrane helix 3 does not directly participate in formation of the active site. Interaction with transmembrane helix 3 may impact overall stabilization of the protein structure and may contribute to supporting a structure that is conducive for catalysis. The substantial reduction of side chain volume achieved when a Gly (G) residue is substituted for a Phe (F) residue at position 82 may modulate the helical bundle structure of the PT protein to produce subtle changes in active site shape, and therefore improve substrate binding capabilities and catalysis.

[0610] Without wishing to be bound by any theory, amino acid position 94 is located on a short loop between transmembrane helix 2 and transmembrane helix 3 that is peripheral to the metal ions within the active site of the PT structure. The substitution from Asp (D) to Glu (E) at position 94 increases the side-chain length, which may better position the carboxylate group for favorable hydrogen bonding with neighboring polar/basic amino acids such as R97, Q162, and K228. Favorable hydrogen bonding may stabilize this loop and, in turn, act to stabilize the metal-binding site and proximal active site within the chimeric PT structure.

[0611] Without wishing to be bound by any theory, amino acid position 147 is located at the approximate midpoint of transmembrane helix 4 within the membrane. Transmembrane helix 4 is one of the transmembrane helices that form the enzyme active site. Amino acid position 147 faces outward, away from the active site, and is positioned to make contacts with neighboring transmembrane helix 2 and transmembrane helix 3 as well as to interact with lipid chains within the membrane. The substitution of the β-branched Ile (I) with Leu (L), which has a different geometric shape, may improve side chain packing of neighboring hydrophobic residues. This, in turn, may help to stabilize the interactions between transmembrane helices 2-4 and thereby improve active site shape and stability.

[0612] Without wishing to be bound by any theory, amino acid position 254 is located at the approximate midpoint of transmembrane helix 7 and faces transmembrane helix 6 and transmembrane helix 8 in a region that is distal from the active site. This area of the PT structure is not lipid-facing. Amino acids located at the interface between transmembrane helices 6-8 are overwhelmingly occupied by hydrophobic residues. However, polar amino acids T213 on transmembrane helix 6 and S277 on transmembrane helix 8 are well-positioned for forming hydrogen bonds with a polar amino acid at position 254. The substitution from Thr (T) to Asp (N) may facilitate better hydrogen bonding between the transmembrane helices 6-8 and thereby improve protein helical packing and stability.

[0613] Without wishing to be bound by any theory, amino acid position 140 is located on transmembrane helix 4 in a location that is distal to the active site. Position 140 faces outward, away from the active site, and is positioned to make contacts with neighboring transmembrane helix 3 and with hydrophobic lipid chains within the membrane. The substitution of the β-branched Ile (I) with Leu (L), which has a different geometric shape, may improve the side chain packing between position 140 and the side chains of neighboring hydrophobic residues. This may help stabilize the interactions between transmembrane helices 2 and 4 and thereby improve active site shape and stability.

[0614] Without wishing to be bound by any theory, amino acid position 227 is located on a short helix that connects transmembrane helix 6 with transmembrane helix 7. This short helix may be important for positioning metal ions within the active site. The helix contains D222 and D226, either of which may chelate one of the divalent metals of the di-metal binding site. Position 227 lies on the apposing side of the helix and faces away from the active site. The substitution of alanine for the flexible, positively charged side chain of lysine may provide additional hydrogen bonding interactions with neighboring charged and polar side chains such as E224 and T236. Such interactions could help to stabilize the local structure and thereby improve metal ion coordination by the short helix and active site shape and stability within the chimeric PT structure.

TABLE 12
Activity data of Gen 5 library members in S. cerevisiae

| | | | Average | Standard |
|---|---|---|---|---|
| Strain | Strain type, PT type | Parent chimera | CBGA | Deviation CBGA |
| ID | Mutation (if applicable) | strain | [μg/L] | [μg/L] |
| t818980 | Positive control Chimeric PT | t524816 | 175694.494 | 22582.501 |
| t819132 | Positive control Chimeric PT | t523834 | 163210.436 | 28489.014 |
| t819140 | Negative control | N/A | 0.000 | 0.000 |
| t880043 | Library Chimera; T30A L34F | t523834 | 170493.541 | 8410.356 |
| | M43L S45L I86A M87I D94E | | | |
| | E113R V140I I142L I147L | | | |
| | A149L S182V G211S M212I | | | |
| | V234L R241K F245R V250L | | | |
| | L256V S258A I264N Q267F | | | |
| | Q288R L311N | | | |
| t879667 | Library Chimera; F82G D94E | t524816 | 152277.473 | 7184.982 |
| | I147L A227R | | | |
| t879993 | Library Chimera; V39T F82G | t524816 | 126186.758 | 3921.598 |
| | D94E I147L | | | |
| t879001 | Library Chimera; F82G D94E | t524816 | 173439.736 | 20599.208 |
| | I140T I147L | | | |
| t879539 | Library Chimera; F82G D94E | t524816 | 144431.229 | 13241.256 |
| | I147L V246L | | | |
| t879989 | Library Chimera; F82G D94E | t524816 | 144533.233 | 3931.854 |
| | I147L A262G | | | |
| t879340 | Library Chimera; F82G D94E | t524816 | 201914.203 | 20657.612 |
| | I147L A227K T254N | | | |
| t880030 | Library Chimera; F82G D94E | t524816 | 141342.713 | 8896.624 |
| | I147L L204I | | | |
| t879474 | Library Chimera; M75V F82G | t524816 | 211057.531 | 28129.096 |
| | D94E I147L T254N | | | |
| t879791 | Library Chimera; F82G D94E | t524816 | 147559.694 | 11212.613 |
| | I147L T254L | | | |
| t879562 | Library Chimera; F82G D94E | t524816 | 150333.559 | 13526.336 |
| | I147L T254N | | | |
| t880029 | Library Chimera; T30A M43L | t523834 | 141702.729 | 6421.816 |
| | I86A D94E E113R I121S | | | |
| | V129I F141S I147L F148L | | | |
| | A149L T171I S173L S182V | | | |
| | G211S M212L T213V R241K | | | |
| | F245R V247C V250L Q267F | | | |
| | I286F Q288R L311N | | | |
| t879750 | Library Chimera; L62I F82G | t524816 | 196738.135 | 27490.758 |
| | D94E I147L | | | |
| t879685 | Library Chimera; L68F F82G | t524816 | 204562.128 | 7265.318 |
| | D94E I147L | | | |
| t879512 | Library Chimera; F82G D94E | t524816 | 140821.971 | 5063.581 |
| | I147L T254N S257G | | | |
| t879297 | Library Chimera; F82G D94E | t524816 | 151858.309 | 17158.912 |
| | I147L I172F | | | |
| t879827 | Library Chimera; F82G D94E | t524816 | 138789.773 | 8532.164 |
| | I147L T213V T254N | | | |
| t879670 | Library Chimera; F82G D94E | t524816 | 192735.876 | 22103.663 |
| | I147L I172L | | | |
| t879624 | Library Chimera; F82G D94E | t524816 | 166374.236 | 28897.902 |
| | I147L V250I T254N | | | |
| t879758 | Library Chimera; F82G D94E | t524816 | 181965.274 | 23613.108 |
| | I147L R241K | | | |
| t879503 | Library Chimera; F82G D94E | t524816 | 121978.530 | 6827.481 |
| | I147L L275I | | | |
| t879068 | Library Chimera; F82G D94E | t524816 | 146099.097 | 22420.368 |
| | I147L V250T T254N | | | |
| t879840 | Library Chimera; F82G D94E | t524816 | 149209.493 | 33824.100 |
| | I147L L260I | | | |
| t879356 | Library Chimera; F82G D94E | t524816 | 145873.036 | 14741.449 |
| | I147L P199A | | | |
| t879725 | Library Chimera; F82G D94E | t524816 | 199132.512 | 11106.953 |
| | I147L M196L | | | |
| t879071 | Library Chimera; F82G D94E | t524816 | 161595.561 | 15585.876 |
| | I117L I147 | | | |
| t879768 | Library Chimera; F82G D94E | t524816 | 167873.094 | 24066.282 |
| | I147L C284W | | | |
| t879836 | Library Chimera; F82G D94E | t524816 | 129222.358 | 16372.137 |
| | I147L V250I | | | |
| t880054 | Library Chimera, F82G D94E | t524816 | 153869.073 | 36388.819 |
| | I147L A227K | | | |
| t879626 | Library Chimera; F82G D94E | t524816 | 161554.177 | 11284.066 |
| | I147L F151I | | | |
| t879983 | Library Chimera; F82G D94E | t524816 | 114331.302 | 8822.396 |
| | I147L V209L | | | |
| t879726 | Library Chimera; F82G D94E | t524816 | 121721.151 | 29724.035 |
| | I147L A152I | | | |
| t879529 | Library Chimera; F82G D94E | t524816 | 151369.222 | 32685.240 |
| | I147L S257G | | | |
| t879304 | Library Chimera; F82G D94E | t524816 | 200335.440 | 35457.308 |
| | I140L I147L | | | |
| t879708 | Library Chimera; F82G D94B | t524816 | 150966.550 | 14695.071 |
| | I147L I264F | | | |
| t879602 | Library Chimera; F82G D94E | t524816 | 144242.121 | 13314.593 |
| | I147L V247S | | | |
| t879151 | Library Chimera; F82G D94E | t524816 | 185466.132 | 37760.532 |
| | I147L V250A T254N | | | |
| t879382 | Library Chimera; F82G D94E | t524816 | 125149.387 | 11121.786 |
| | I147L V234L | | | |
| t879774 | Library Chimera; F82G D94E | t524816 | 208158.959 | 43196.788 |
| | I147L M196I | | | |
| t879650 | Library Chimera; F82G D94E | t524816 | 139292.023 | 4545.558 |
| | I147L V231I | | | |
| t879418 | Library Chimera; F82G D94E | t524816 | 162123.189 | 17784.632 |
| | I147L V234F | | | |
| t879399 | Library Chimera; F82G I86G | t524816 | 111168.478 | 6471.574 |
| | D94E I147L | | | |
| t879949 | Library Chimera; F82G D94E | t524816 | 192476.165 | 43008.487 |
| | I147L V246I | | | |
| t879660 | Library Chimera; F82G D94E | t524816 | 179503.103 | 15093.285 |
| | I147L T254A | | | |
| t879522 | Library Chimera; M75V F82G | t524816 | 192820.446 | 20860.992 |
| | D94E I147L | | | |
| t879193 | Library Chimera; F82G D94E | t524816 | 135008.127 | 18683.450 |
| | I147L T213V | | | |
| t879977 | Library Chimera; L34F M43L | t523834 | 87712.533 | 13657.490 |
| | I46A G49S I86A M87I D94E | | | |
| | M110L E113R V140I F141S | | | |
| | I147L A149L I172F G177T | | | |
| | A179P A227K V234L F245R | | | |
| | L256V S258A Q267F L276F | | | |
| | Q288R L311N | | | |
| t879357 | Library Chimera; M43L F82G | t523834 | 192417.151 | 19315.025 |
| | A85N I86G M87I D94E | | | |
| | V106A E113R F141S I142L | | | |
| | I147L A149L T171I A179N | | | |
| | A227K Y229H V234L R241K | | | |
| | F245R V250F V257L S258A | | | |
| | Q267F Q288R L311K | | | |
| t879819 | Library Chimera; M751 F82G | t524816 | 149529.245 | 8652.322 |
| | D94E I147L | | | |
| t879233 | Library Chimera; F82G D94E | t524816 | 131379.102 | 10439.037 |
| | I147L V234L T254N | | | |
| t879240 | Library Chimera; F82G D94E | t524816 | 191051.721 | 30083.686 |
| | I147L T254C | | | |
| t879205 | Library Chimera; F82G D94E | t524816 | 182552.424 | 32995.758 |
| | I147L F190V | | | |
| t879397 | Library Chimera; F82G D94E | t524816 | 107599.193 | 10415.264 |
| | I147L G177L T254N | | | |
| t879014 | Library Chimera; F82G D94E | t524816 | 138417.704 | 20454.970 |
| | I147L M212I | | | |
| t879150 | Library Chimera; T30A V39T | t523834 | 155619.152 | 7756.253 |
| | M43L F82G A85N M87I | | | |
| | D94E E113R V129I V140F | | | |
| | I142L I147L A149L T171I | | | |
| | G211T A227K V234L M243T | | | |
| | F245R V246I V247C V250L | | | |
| | Q267F Q288R L311K | | | |
| t879592 | Library Chimera; L34F Q35T | t523834 | 175801.493 | 36415.331 |
| | M43L G49S I86A D94E | | | |
| | D102Y E113R F139L I147L | | | |
| | A149L S182V T213V A227R | | | |
| | V234L T236V F245R V247G | | | |
| | V250L L256V V257G Q267F | | | |
| | F283S Q288R L311N | | | |
| t879184 | Library Chimera; T30A C31F | t523834 | 116598.214 | 8498.857 |
| | M43V I46G G49A I86G | | | |
| | M87V D94E L105I E113R | | | |
| | F139L F141I F145L L169A | | | |
| | T171I S173L S182V M210F | | | |
| | T213A V234L F245W V250L | | | |
| | S258A Q267F Q288R | | | |
| t879918 | Library Chimera; T30A C31F | t523834 | 78895.027 | 8685.767 |
| | M43L S45I A73G V75I I86A | | | |
| | M87L D94E M110L E113R | | | |
| | I142L I147L G177V M212L | | | |
| | K228A V234L N242T F245R | | | |
| | V247C V250L V257L S258A | | | |
| | Q267F Q288R | | | |
| t879813 | Library Chimera; T30A M43L | t523834 | 118559.394 | 16644.042 |
| | G52A I86A D94E E113R | | | |
| | I121S V129L F141S I147L | | | |
| | T171I S182V G211A A227R | | | |
| | V234F F245R V247C V250L | | | |
| | V257G S258A Q267F S271K | | | |
| | C284W Q288R L311N | | | |
| t879338 | Library Chimera; M43L F82G | t523834 | 92127.782 | 1620.022 |
| | A85N I86G M87I D94E | | | |
| | E113R F141I I147L T171I | | | |
| | G177T S182V R197S M212L | | | |
| | T213A A227K V234L M243S | | | |
| | F245R V250L Q267F L276P | | | |
| | F283S Q288R L311K | | | |
| t879042 | Library Chimera; M43L I46G | t523834 | 140688.126 | 11763.228 |
| | F82G M87I D94E V106A | | | |
| | M110L E113R V129L I147L | | | |
| | A149I T171I A179N M212L | | | |
| | Y229F V234L R241K F245R | | | |
| | V246I V247C V250L S258A | | | |
| | Q267F Q288R L311K | | | |
| t879155 | Library Chimera; T30A M43L | t523834 | 88132.230 | 4692.516 |
| | G49S I86A M87I D94E | | | |
| | D102Y V106A E113R I121S | | | |
| | V129L V140L I147L A179N | | | |
| | R197S T213V A227K M243T | | | |
| | F245R V246L V247C V250L | | | |
| | Q267F Q288R L311N | | | |
| t879940 | Library Chimera; C31F M43L | t523834 | 63125.890 | 11123.768 |
| | I86A M87I D94E V106A | | | |
| | E113R I121S V129I F139L | | | |
| | F141C I147L T171I S173I | | | |
| | A179P M212I A227K V234L | | | |
| | R241K F245R V246I V247C | | | |
| | Q267F C284F Q288R | | | |
| t879345 | Library Chimera; M43L S45L | t523834 | 120438.544 | 6780.953 |
| | I86A D94E V106A E113R | | | |
| | F139A I147L F148L A149L | | | |
| | T171I T213V I223V V234L | | | |
| | T236V A240V R241K M243T | | | |
| | F245R V246L V247C V257G | | | |
| | Q267F Q288R L311N | | | |
| t879857 | Library Chimera; T30A C31F | t523834 | 114389.228 | 21090.908 |
| | M43L I86V M87V D94E | | | |
| | F139L F141S F145L I147L | | | |
| | F148L T171I G177I T181V | | | |
| | R197S M207V G211S V234L | | | |
| | F245R V246L V247C V250L | | | |
| | L276G C284S L311N | | | |
| t879788 | Library Chimera; T30A C31F | t523834 | 79227.020 | 3851.553 |
| | Q3ST M43L S45L I46C V75I | | | |
| | I86A D94E V106A E113R | | | |
| | V129I F139I I147L A149L | | | |
| | F151A I172F T213A V234L | | | |
| | F245R V246I V250L S258A | | | |
| | Q267F Q288R | | | |
| t879606 | Library Chimera; L34F M43L | t523834 | 79951.765 | 8436.423 |
| | S45L F82G I86G D94E E113R | | | |
| | F139L V140T I147L G177T | | | |
| | A179N S182F M212I A227K | | | |
| | M243T F245R V246L V247C | | | |
| | V250L S258A Q267F L276F | | | |
| | Q288R L311K | | | |
| t879579 | Library Chimera; C31F V39T | t523834 | 57679.345 | 13043.316 |
| | M43V I46G F82A A85N | | | |
| | M87V D94E E113R V129L | | | |
| | F139L F145L A149L I172L | | | |
| | G177I M210F A227K F245W | | | |
| | V246L V247C V257G S258A | | | |
| | Q267F C284W Q288R | | | |
| t879488 | Library Chimera; T30A C31F | t523834 | 78734.692 | 9536.254 |
| | V39T M43V S45L I46G G49C | | | |
| | F72A S79L M87V D94E | | | |
| | E113R I121S I128L F145L | | | |
| | S182V A227K Y229F V234L | | | |
| | F245W V247C V250L Q267F | | | |
| | F283S Q288R | | | |
| t879191 | Library Chimera; Q35A M43L | t523834 | 86979.624 | 5693.817 |
| | V75I I86A M87I D94E L105I | | | |
| | E113R L118I F139L V140L | | | |
| | I142L I147L F151A T213V | | | |
| | V234M M243I F245R L256V | | | |
| | V257G S258A I264F Q267F | | | |
| | Q288R L311N | | | |
| t879379 | Library Chimera; C31F L34F | t523834 | 82667.992 | 7613.952 |
| | Q35S V39T M43L A47S | | | |
| | F72V A85N I86V M87V | | | |
| | D94E V129L F141S F145L | | | |
| | I147L A152V T171I S182V | | | |
| | M207V G211S T213V A227K | | | |
| | F245R V250L L311N | | | |
| t879066 | Library Chimera; T30A C31F | t523834 | 75354.780 | 12510.620 |
| | M43L I86A D94E M110I | | | |
| | E113R L118I I121S V129I | | | |
| | I147L F151A M212I T213G | | | |
| | I223V V234L A240V R241K | | | |
| | N242T F245R V246L S258A | | | |
| | Q267F L281A Q288R | | | |
| t879874 | Library Chimera; T30A C31F | t523834 | 61341.164 | 16431.817 |
| | V39T M43L S79C I86V | | | |
| | M87V D94E V106A F141S | | | |
| | F145L I147L A149L T171I | | | |
| | S174V M210F M212L T213V | | | |
| | F245R V246L V247C V250L | | | |
| | V257G S258A L311N | | | |
| t879638 | Library Chimera; C31F M43V | t523834 | 84304.795 | 24914.102 |
| | S45L G49I F72V F82A M87V | | | |
| | D94E V106A E113R V129L | | | |
| | F141V I142L F145L G211S | | | |
| | A227K V234L R241K F245W | | | |
| | L256V S258A Q267F A279I | | | |
| | C284W Q288R | | | |
| t879848 | Library Chimera; C31F M43L | t523834 | 64360.787 | 22050.354 |
| | S45F V75I I86V M87V D94E | | | |
| | L105I V106A F139L V140T | | | |
| | F141V F145L I147L A152I | | | |
| | T171I G177L A179P M207V | | | |
| | A227R V234L F245R V247G | | | |
| | S258A L311N | | | |
| t879358 | Library Chimera; C31F M43V | t523834 | 78679.866 | 5682.462 |
| | M87V D94E M110L E113R | | | |
| | F139L V140T F141S F145L | | | |
| | L169I I172L G177L A227K | | | |
| | V234F F245W V246I V247C | | | |
| | V250L L252I L256V V257G | | | |
| | S258A Q267F Q288R | | | |
| t879809 | Library Chimera; T30A C31F | t523834 | 92187.080 | 11927.825 |
| | M43L I86A M87I D94E | | | |
| | E113R V129L I142L I147L | | | |
| | A152F T171I G177L M210F | | | |
| | G211S T213V A227K V234L | | | |
| | R241K F245R V246I S258A | | | |
| | Q267F C284W Q288R | | | |
| t879226 | Library Chimera; T30A C31F | t523834 | 54910.466 | 3519.672 |
| | V40I M43L S45L I46G G49S | | | |
| | I86A D94E V106A M110L | | | |
| | E113R V129I I147L A149L | | | |
| | T171I G211S M212L T213V | | | |
| | A227R V234L F245R V250L | | | |
| | Q267F Q288R | | | |
| t879141 | Library Chimera; T30A M43L | t523834 | 84415.083 | 10229.372 |
| | S79L A85N I86A D94E | | | |
| | E113R V129I F139L I147L | | | |
| | A149L T171I S182V G211S | | | |
| | Y229F A240V R241K M243T | | | |
| | F245R V247C V250L Q267F | | | |
| | C284I Q288R L311N | | | |
| t879439 | Library Chimera; C31F L34F | t523834 | 75220.691 | 6905.057 |
| | M43L I86A D94E V106A | | | |
| | E113R L118I F141C I147L | | | |
| | A149L F151A S174V S182V | | | |
| | M207V G211S A227K R241K | | | |
| | F245R V246A L256V S258A | | | |
| | Q267F C284V Q288R | | | |
| t879243 | Library Chimera; V40I M43L | t523834 | 64286.707 | 7175.765 |
| | S45L I86A M87I D94E | | | |
| | V106A E113R I147L A149L | | | |
| | F151T N167A T171I S173T | | | |
| | T213V A227K R241K M243T | | | |
| | F245R V246L V247C L256V | | | |
| | Q267F Q288R L311N | | | |
| t879134 | Library Chimera; M43L F82G | t523834 | 115617.059 | 22697.688 |
| | D94E E113R F139I F141S | | | |
| | I142L I147L A149L A179N | | | |
| | S182V M212I I223V V231I | | | |
| | V234L A240V R241K F245R | | | |
| | V247C S258A Q267F S271G | | | |
| | F283S Q288R L311K | | | |
| t879557 | Library Chimera; C31F V39T | t523834 | 58629.854 | 25074.814 |
| | M43V S45I S63N M87V | | | |
| | D94E E113R F139L V140T | | | |
| | F141V F145L A152I S182V | | | |
| | R197S I204T A227K R241K | | | |
| | F245W V246A L256V V257G | | | |
| | S258A Q267F Q288R | | | |
| t879202 | Library Chimera; M43L S45L | t523834 | 58177.285 | 7276.930 |
| | I86A M87I D94E E113R | | | |
| | V129L I142L I147L A149L | | | |
| | T171I I172V G177I A179N | | | |
| | S182V I204T M210F T213V | | | |
| | V234L R241K F245R V250L | | | |
| | Q267F Q288R L311N | | | |
| t879067 | Library Chimera; T30A C31F | t523834 | 45523.355 | 16077.836 |
| | M43L I46G I86V M87V D94E | | | |
| | M110I V129L F139L F145L | | | |
| | I147L A149L T171I G177L | | | |
| | A179N A227K Y229F R241K | | | |
| | F245R V246L V247C V250L | | | |
| | I264F L311N | | | |
| t879099 | Library Chimera; M43L S45L | t523834 | 48045.631 | 8886.190 |
| | I46A P76A I86A M87I D94E | | | |
| | V106A E113R F141C I147L | | | |
| | F151T A152I M207V M212L | | | |
| | A227R V234L T236A M243I | | | |
| | F245R V247C S258A Q267F | | | |
| | Q288R L311N | | | |
| t879286 | Library Chimera; L34F V39T | t523834 | 59673.669 | 8772.249 |
| | M43L S45L F82G I86G M87I | | | |
| | D94E V106A E113R V140F | | | |
| | I147L T171I G211S T213A | | | |
| | F216I V234L M243A F245R | | | |
| | V246L V247C Q267F C284W | | | |
| | Q288R L311K | | | |
| t878988 | Library Chimera; T30A M43L | t523834 | 80322.940 | 18108.485 |
| | S63N I86A M87I D94E | | | |
| | V106A E113R I147L F151T | | | |
| | N167A A179N S182V M212I | | | |
| | A217T V234L R241K M243T | | | |
| | F245R V246F V247C Q267F | | | |
| | C284W Q288R L311N | | | |
| t879148 | Library Chimera; M43L I46G | t523834 | 105412.794 | 9519.791 |
| | I86A M87I D94E V106A | | | |
| | M110I E113R L124V F139L | | | |
| | I147L F151A T171I G211S | | | |
| | A227K F245R V247C V250L | | | |
| | L256V S258A Q267F C284V | | | |
| | Q288R T289A L311N | | | |
| t879235 | Library Chimera; T30A M43L | t523834 | 59433.595 | 11443.790 |
| | I46G G49S I86A M87I D94E | | | |
| | M110L E113R F139L F141G | | | |
| | I147L T171I I172V S173T | | | |
| | T213A A227K V231I M243A | | | |
| | F245R V247C V250L Q267F | | | |
| | Q288R L311N | | | |
| t879422 | Library Chimera; C31F M43V | t523834 | 59558.511 | 35589.672 |
| | A47S A73G S79C M87V | | | |
| | D94E E113R V129I F141S | | | |
| | F145L A149L A152L T171I | | | |
| | A179N S182V M210F M212L | | | |
| | V234L R241K F245W V247C | | | |
| | S258A Q267F Q288R | | | |
| t879687 | Library Chimera; T30A C31F | t523834 | 52124.680 | 4466.185 |
| | M43L G49S I86A D94E | | | |
| | E113R L118I I121S V129L | | | |
| | F139I I142L I147L G177I | | | |
| | G211S A227K Y229F V234L | | | |
| | R241K F245R V246I V247C | | | |
| | V250L Q267F Q288R | | | |
| t879050 | Library Chimera; T30A M43L | t523834 | 72183.240 | 35538.907 |
| | S45L S79L F82G D94E | | | |
| | E113R V129I F141S I142L | | | |
| | I147L G177I A179N S182V | | | |
| | M212I V234F R241K F245R | | | |
| | V247C V250L S258A Q267F | | | |
| | C284W Q288R L311K | | | |
| t879913 | Library Chimera; T30A M43L | t523834 | 41890.787 | 13854.261 |
| | F82G D94E E113R V129I | | | |
| | V140T F141C I142L I147L | | | |
| | A179N S182V I204T A227R | | | |
| | V234M M243T F245R V246I | | | |
| | V247C V250L S258A Q267F | | | |
| | C284W Q288R L311K | | | |
| t879059 | Library Chimera; M43L F72Q | t523834 | 46615.362 | 2367.213 |
| | F82G M87I D94E E113R | | | |
| | I147L A149L N167A T171I | | | |
| | S173L S182V F200L M212I | | | |
| | V231I V234F M243T F245R | | | |
| | V246I V247C V250L S258A | | | |
| | Q267F Q288R L311K | | | |
| t879037 | Library Chimera; T30A V40I | t523834 | 64424.527 | 10449.887 |
| | M43L F82G M87I D94E | | | |
| | E113R I147L T171I S173L | | | |
| | G177T V209L M212L Y229F | | | |
| | V234L R241K F245R V246I | | | |
| | V247C V250I S258A Q267F | | | |
| | C284W Q288R L311K | | | |
| t879885 | Library Chimera; T30A M43L | t523834 | 62635.148 | 11681.814 |
| | S45L I86A D94E E113R | | | |
| | V129L F141A I142L I147L | | | |
| | A149L F151A N167A T17LI | | | |
| | A179N M210F T213V V231I | | | |
| | R241K F245R V247C V250L | | | |
| | Q267F Q288R L311N | | | |
| t879332 | Library Chimera; T30A C31F | t523834 | 86682.150 | 6367.491 |
| | V39T V40I M43L A85N I86V | | | |
| | M87V D94E V129L V140T | | | |
| | F145L I147L S182V M207V | | | |
| | G211S T213V A227R V234L | | | |
| | F245R V246L V247C V257G | | | |
| | S258A L311N | | | |
| t879116 | Library Chimera; T30A M43L | t523834 | 55977.236 | 8274.306 |
| | S45L G49S S79L I86A D94E | | | |
| | E113R I142L I147L A149L | | | |
| | NI67A T171I G211S T213V | | | |
| | I220L V234L F245R V246I | | | |
| | V247C V250L L256V Q267F | | | |
| | Q288R L311N | | | |
| t879830 | Library Chimera; C31F M43V | t523834 | 54191.912 | 3133.435 |
| | I46G M87V D94E V106A | | | |
| | E113R F139L F141V I142L | | | |
| | F145L I172L S173L S182V | | | |
| | M212L T213V I220L V234L | | | |
| | N242T F245W V247C V257G | | | |
| | Q267F S271L Q288R | | | |

### Example 9: Biosynthesis of Cannabinoids in Engineered S. cerevisiae Host Cells

[0615] The activation of an organic acid to its CoA-thioester and the subsequent condensation of this thioester with a number of malonyl-CoA molecules, or other similar polyketide extender units, represent the first two steps in the biosynthesis of all known cannabinoids. To demonstrate the biosynthesis of CBGA (FIG. 1, Formula 8a), CBDA (FIG. 1, Formula 9a), THCA (FIG. 1, Formula 10a), and/or CBCA (FIG. 1, Formula 11a) the cannabinoid biosynthetic pathway show in FIG. 1 is assembled in the genome of a prototrophic S. cerevisiae CEN.PK host cell wherein each enzyme (R1a-R5a) may be present in one or more copies. For example, the S. cerevisiae host cell may express one or more copies of one or more of: an AAE, an OLS, an OAC, a PT, and a TS.

[0616] The AAE enzyme used may be a naturally occurring or synthetic AAE that is functionally expressed in S. cerevisiae, or a variant thereof, with activity on hexanaoic acid. The OLS enzyme may be a naturally occurring or synthetic OLS that is functionally expressed in S. cerevisiae. The OAC enzyme may be a naturally occurring or synthetic OAC that is functionally expressed in S. cerevisiae. In instances where a bifunctional OLS is used, a separate OAC enzyme may or may not be omitted.

[0617] A PT enzyme, such as a CBGAS enzyme, may be a naturally occurring or synthetic PT that is functionally expressed in S. cerevisiae, or a variant thereof, including a PT from C. sativa or a variant of a PT from C. sativa. The PT enzyme may comprise one or more of the PT enzymes provided in this disclosure.

[0618] A TS enzyme may be a naturally occurring or synthetic TS that is functionally expressed in S. cerevisiae, or a variant thereof, including a TS from C. sativa or a variant of a TS from C. sativa. The TS enzyme may be a TS that produces one or more of CBDA, THCA, and CBCA as a majority product.

[0619] The cannabinoid fermentation procedure may be similar to the PT assay described in the Examples above, except that the incubation of production cultures may last from, for example, 48-144 hours and production cultures may be supplemented with, for example, 4% galactose and 1 mM sodium hexanoate every 24 hours. Titers of CBGA, CBDA, THCA, and/or CBCA are quantified via LC-MS.

[0620] It should be appreciated that sequences provided in this disclosure may or may not contain signal sequences. The sequences provided in this disclosure encompass versions with or without signal sequences. It should also be understood that protein sequences provided in this disclosure may be depicted with or without a start codon (M). Accordingly, in some instances amino acid numbering may correspond to protein sequences containing a start codon, while in other instances, amino acid numbering may correspond to protein sequences that do not contain a start codon. It should also be understood that sequences provided in this disclosure may be depicted with or without a stop codon. Aspects of the disclosure encompass host cells comprising any of the sequences provided in this disclosure, including the sequences within Tables 13-20 and fragments thereof.

### Additional Tables Associated with the Disclosure

TABLE 13
Prenyltransferase sequences associated with Examples 1-2

| | Strain type | PT Protein | PT Nucleic Acid |
|---|---|---|---|
| Strain | PT type | SEQ ID NO: | SEQ ID NO: |
| t523578 | Library | 110 | 133 |
| | (CsPT4-CsPT7 chimera) | | |
| t523602 | Library | 111 | 134 |
| | (CsPT4-CsPT7 chimera) | | |
| t523722 | Library | 112 | 135 |
| | (CsPT4-CsPT6 chimera) | | |
| t523777 | Library | 113 | 136 |
| | (CsPT4-CsPT1 chimera) | | |
| t523834 | Library | 114 | 137 |
| | (CsPT4-CsPT1 chimera) | | |
| t524736 | Library | 115 | 138 |
| | (CsPT4-CsPT1 chimera) | | |
| t524816 | Library | 116 | 139 |
| | (CsPT4-CsPT7 chimera) | | |
| t524866 | Library | 117 | 140 |
| | (CsPT4-CsPT6 chimera) | | |
| t525864 | Library | 118 | 141 |
| | (CsPT4-CsPT1 chimera) | | |
| t526650 | Library | 119 | 142 |
| | (CsPT4-CsPT7 chimera) | | |
| t526890 | Library | 120 | 143 |
| | (CsPT4-CsPT7 chimera) | | |
| t526897 | Library | 121 | 144 |
| | (CsPT4-CsPT1 chimera) | | |
| t524521 | Library | 122 | 145 |
| | (fusion) | | |
| t524649 | Library | 123 | 146 |
| | (fusion) | | |
| t524722 | Library | 124 | 147 |
| | (fusion) | | |
| t524730 | Library | 125 | 148 |
| | (fusion) | | |
| t524834 | Library | 126 | 149 |
| | (fusion) | | |
| t524842 | Library | 127 | 150 |
| | (fusion) | | |
| t526009 | Library | 128 | 151 |
| | (fusion) | | |
| t526811 | Library | 129 | 152 |
| | (fusion) | | |
| t526843 | Library | 130 | 153 |
| | (fusion) | | |
| t526923 | Library | 131 | 154 |
| | (fusion) | | |
| t526955 | Library | 132 | 155 |
| | (fusion) | | |

TABLE 14
Chimeric fusion sequences associated with
the Gen 2 PT library described in Example 3

| | | PT | Nucleic |
|---|---|---|---|
| | | Protein | Acid |
| | Strain type/ | SEQ | SEQ |
| Strain | PT type | ID NO: | ID NO: |
| t612532 | Library | 156 | 191 |
| | (ERG20ww-Chimera fusion; CsPT1-CsPT4) | | |
| t612533 | Library | 157 | 192 |
| | (ERG20ww-Chimera fusion; CsPT4-CsPT6) | | |
| t612534 | Library | 158 | 193 |
| | (ERG20ww-Chimera fusion; CsPT4-CsPT7) | | |
| t612535 | Library | 159 | 194 |
| | (ERG20ww-Chimera fusion; CsPT1-CsPT4) | | |
| t612536 | Library | 160 | 195 |
| | (ERG20ww-Chimera fusion; CsPT4-CsPT7) | | |
| t612537 | Library | 161 | 196 |
| | (ERG20ww-Chimera fusion; CsPT4-CsPT7) | | |
| t612538 | Library | 162 | 197 |
| | (ERG20ww-Chimera fusion; CsPT4-CsPT7) | | |
| t612539 | Library | 163 | 198 |
| | (ERG20ww-Chimera fusion; CsPT1-CsPT4) | | |
| t612540 | Library | 164 | 199 |
| | (ERG20ww-Chimera fusion; CsPT1-CsPT4) | | |
| t612541 | Library | 165 | 200 |
| | (ERG20ww-Chimera fusion; CsPT4-CsPT6) | | |
| t612542 | Library | 166 | 201 |
| | (ERG20ww-Chimera fusion; CsPT1-CsPT4) | | |
| t612543 | Library | 167 | 202 |
| | (ERG20ww-Chimera fusion; CsPT1-CsPT4) | | |
| t612544 | Library | 168 | 203 |
| | (ERG20ww-Chimera fusion; CsPT4-CsPT7) | | |
| t612545 | Library | 169 | 204 |
| | (ERG20ww-Chimera fusion; CsPT1-CsPT4) | | |
| t612546 | Library | 170 | 205 |
| | (ERG20ww-Chimera fusion; CsPT1-CsPT4) | | |
| t612547 | Library | 171 | 206 |
| | (ERG20ww-Chimera fusion; CsPT4-CsPT7) | | |
| t612548 | Library | 172 | 207 |
| | (ERG20ww-Chimera fusion; CsPT4-CsPT7) | | |
| t612549 | Library | 173 | 208 |
| | (ERG20ww-Chimera fusion; CsPT4-CsPT7) | | |
| t612550 | Library | 174 | 209 |
| | (ERG20ww-Chimera fusion; CsPT1-CsPT4) | | |
| t612551 | Library | 175 | 210 |
| | (ERG20ww-Chimera fusion; CsPT1-CsPT4) | | |
| t612552 | Library | 176 | 211 |
| | (ERG20ww-Chimera fusion; CsPT1-CsPT4) | | |
| t612553 | Library | 177 | 212 |
| | (ERG20ww-Chimera fusion; CsPT4-CsPT6) | | |
| t612554 | Library | 178 | 213 |
| | (ERG20ww-Chimera fusion; CsPT4-CsPT6) | | |
| t612555 | Library | 179 | 214 |
| | (ERG20ww-Chimera fusion; CsPT4-CsPT7) | | |
| t612556 | Library | 180 | 215 |
| | (ERG20ww-Chimera fusion; CsPT1-CsPT4) | | |
| t612557 | Library | 181 | 216 |
| | (ERG20ww-Chimera fusion; CsPT1-CsPT4) | | |
| t612558 | Library | 182 | 217 |
| | (ERG20ww-Chimera fusion; CsPT1-CsPT4) | | |
| t612559 | Library | 183 | 218 |
| | (ERG20ww-Chimera fusion; CsPT1-CsPT4) | | |
| t612560 | Library | 184 | 219 |
| | (ERG20ww-Chimera fusion; CsPT1-CsPT4) | | |
| t612561 | Library | 185 | 220 |
| | (ERG20ww-Chimera fusion; CsPT1-CsPT4) | | |
| t612562 | Library | 186 | 221 |
| | (ERG20ww-Chimera fusion; CsPT4-CsPT6) | | |
| t612563 | Library | 187 | 222 |
| | (ERG20ww-Chimera fusion; CsPT1-CsPT4) | | |
| t612564 | Library | 188 | 223 |
| | (ERG20ww-Chimera fusion; CsPT1-CsPT4) | | |
| t612565 | Library | 189 | 224 |
| | (ERG20ww-Chimera fusion; CsPT1-CsPT4) | | |
| t612566 | Library | 190 | 225 |
| | (ERG20ww-Chimera fusion; CsPT4-CsPT7) | | |
| t612591 | Library | 704 | 729 |
| | ERG20ww-Chimera fusion | | |
| t612597 | Library | 710 | 735 |
| | ERG20ww-Chimera fusion | | |
| t612611 | Library | 724 | 749 |
| | ERG20ww-Chimera fusion | | |

TABLE 15
Non-limiting examples of sequences of CsPT chimera portions*

| Representative | Chimera Descriptions | | | | | | | | | |
|---|---|---|---|---|---|---|---|---|---|---|
| Strain ID | X1 | X2 | X3 | X4 | X5 | X6 | X7 | X8 | X9 | X10 |
| t524736 | CsPT4 | CsPT1 | CsPT4 | CsPT1 | CsPT4 | CsPT1 | CsPT4 | CsPT1 | CsPT4 | CsPT1 |
| t612532 | 1-53 | 52-66 | 69-130 | 129-135 | 138-183 | 182-197 | 200-260 | 259-270 | 273-317 | 316-321 |
| t612542 | (SEQ | (SEQ | (SEQ | (SEQ | (SEQ | (SEQ | (SEQ | (SEQ | (SEQ | (SEQ |
| t612550 | ID NO: | ID NO: | ID NO: | ID NO: | ID NO: | ID NO: | ID NO: | ID NO: | ID NO: | ID NO: |
| t612563 | 33) | 40) | 47) | 54) | 61) | 68) | 75) | 82) | 89) | NO: |
| t612539 | | | | | | | | | | |
| t524816 | CsPT4 | CsPT7 | CsPT4 | CsPT7 | CsPT4 | CsPT7 | CsPT4 | CsPT7 | CsPT4 | CsPT7 |
| t612534 | 1-50 | 51-77 | 78-123 | 124-146 | 147-177 | 178-206 | 207-253 | 254-278 | 279-310 | 311-323 |
| t612536 | (SEQ | (SEQ | (SEQ | (SEQ | (SEQ | (SEQ | (SEQ | (SEQ | (SEQ | (SEQ |
| t612547 | ID NO: | ID NO: | ID NO: | ID NO: | ID NO: | ID NO: | ID NO: | ID NO: | ID NO: | ID NO: |
| t612549 | 34) | 41) | 48) | 55) | 62) | 69) | 76) | 83) | 90) | 97) |
| t612555 | | | | | | | | | | |
| t612572^{a} | | | | | | | | | | |
| t612578^{b} | | | | | | | | | | |
| t612585^{c} | | | | | | | | | | |
| t612586^{d} | | | | | | | | | | |
| t612588^{e} | | | | | | | | | | |
| t523834 | CsPT4 | CsPT1 | CsPT4 | CsPT1 | CsPT4 | CsPT1 | CsPT4 | CsPT1 | CsPT4 | CsPT1 |
| t612535 | 1-52 | 51-67 | 70-129 | 128-136 | 139-182 | 181-198 | 201-259 | 258-271 | 274-316 | 315-321 |
| t612546 | (SEQ | (SEQ | (SEQ | (SEQ | (SEQ | (SEQ | (SEQ | (SEQ | (SEQ | (SEQ |
| t612552 | ID NO: | ID NO: | ID NO: | ID NO: | ID NO: | ID NO: | ID NO: | ID NO: | ID NO: | ID NO: |
| t612564 | 35) | 42) | 49) | 56) | 63) | 70) | 77) | 84) | 91) | 98) |
| t612565 | | | | | | | | | | |
| t526650 | CsPT4 | CsPT7 | CsPT4 | CsPT7 | CsPT4 | CsPT7 | CsPT4 | CsPT7 | CsPT4 | CsPT7 |
| t612537 | 1-53 | 54-68 | 69-130 | 131-137 | 138-183 | 184-199 | 200-260 | 261-272 | 273-317 | 318-323 |
| t612538 | (SEQ | (SEQ | (SEQ | (SEQ | (SEQ | (SEQ | (SEQ | (SEQ | (SEQ | (SEQ |
| t612544 | ID NO: | ID NO: | ID NO: | ID NO: | ID NO: | ID NO: | ID NO: | ID NO: | ID NO: | ID NO: |
| t612548 | 36) | 43) | 50) | 57) | 64) | 71) | 78) | 85) | 92) | 99) |
| t612566 | | | | | | | | | | |
| t612568^{f} | | | | | | | | | | |
| t612574^{g} | | | | | | | | | | |
| t612582^{h} | | | | | | | | | | |
| t523777 | CsPT4 | CsPT1 | CsPT4 | CsPT1 | CsPT4 | CsPT1 | CsPT4 | CsPT1 | CsPT4 | CsPT1 |
| t612543 | 1-50 | 49-75 | 78-123 | 122-144 | 147-177 | 176-204 | 207-253 | 252-276 | 279-310 | 309-321 |
| t612556 | (SEQ | (SEQ | (SEQ | (SEQ | (SEQ | (SEQ | (SEQ | (SEQ | (SEQ | (SEQ |
| t612558 | ID NO: | ID NO: | ID NO: | ID NO: | ID NO: | ID NO: | ID NO: | ID NO: | ID NO: | ID NO: |
| t612559 | 37) | 44) | 51) | 58) | 65) | 72) | 79) | 86) | 93) | 100) |
| t526897 | CsPT4 | CsPT1 | CsPT4 | CsPT1 | CsPT4 | CsPT1 | CsPT4 | CsPT1 | CsPT4 | CsPT1 |
| t612551 | 1-49 | 48-76 | 79-122 | 121-145 | 148-176 | 175-205 | 208-252 | 251-277 | 280-309 | 308-321 |
| t612560 | (SEQ | (SEQ | (SEQ | (SEQ | (SEQ | (SEQ | (SEQ | (SEQ | (SEQ | (SEQ |
| | ID NO: | ID NO: | ID NO: | ID NO: | ID NO: | ID NO: | ID NO: | ID NO: | ID NO: | ID NO: |
| | 38) | 45) | 52) | 59) | 66) | 73) | 80) | 87) | 94) | 101) |
| t523722 | CsPT4 | CsPT6 | CsPT4 | CsPT6 | CsPT4 | CsPT6 | CsPT4 | CsPT6 | CsPT4 | CsPT6 |
| t612576ⁱ | 1-54 | 104-116 | 68-131 | 178-182 | 137-184 | 233-247 | 199-261 | 311-320 | 272-318 | 366-371 |
| | (SEQ | (SEQ | (SEQ | (SEQ | (SEQ | (SEQ | (SEQ | (SEQ | (SEQ | (SEQ |
| | ID NO: | ID NO: | ID NO: | ID NO: | ID NO: | ID NO: | ID NO: | ID NO: | ID NO: | ID NO: |
| | 39) | 46) | 53) | 60) | 67) | 74) | 81) | 88) | 95) | 102) |

*The amino acid numbering for CsPT1 is based on SEQ ID NO: 1185; the amino acid numbering for CsPT4 is based on SEQ ID NO: 5; the amino acid numbering for CsPT6 is based on SEQ ID NO: 701; and the amino acid numbering for CsPT7 is based on SEQ ID NO: 702.
^{a}The chimeric PT expressed by this strain additionally contains a S232R substitution relative to SEQ ID NO: 5
^{b}The chimeric PT expressed by this strain additionally contains C31F and S232R substitutions relative to SEQ ID NO: 5
^{c}The chimeric PT expressed by this strain additionally contains F245R substitution relative to SEQ ID NO: 5
^{d}The chimeric PT expressed by this strain additionally contains C31F, F245R, and S232R substitutions relative to SEQ ID NO: 5
^{e}The chimeric PT expressed by this strain additionally contains C31F and F245R substitutions relative to SEQ ID NO: 5
^{f}The chimeric PT expressed by this strain additionally contains a S232R substitution relative to SEQ ID NO: 5
^{g}The chimeric PT expressed by this strain additionally contains a C31F substitution relative to SEQ ID NO: 5
^{h}The chimeric PT expressed by this strain additionally contains a F245R substitution relative to SEQ ID NO: 5
ⁱThe chimeric PT expressed by this strain additionally contains a S232R substitution relative to SEQ ID NO: 5

TABLE 16
Prenyltransferase sequences associated with
Gen 3 CsPT4 library described in Example 5

| | | | PT |
|---|---|---|---|
| | | PT | Nucleic |
| | | Protein | Acid |
| | Strain type | SEQ | SEQ |
| Strain | PT type | ID NO: | ID NO: |
| t704346 | Library | 226 | 325 |
| | (ERG20ww-Chimera fusion; CsPT1-CsPT4) | | |
| t704382 | Library | 227 | 326 |
| | (ERG20ww-Chimera fusion; CsPT1-CsPT4) | | |
| t721427 | Library | 228 | 327 |
| | (ERG20ww-Chimera fusion; CsPT4-CsPT6- | | |
| | CsPT7) | | |
| t721429 | Library | 229 | 328 |
| | (ERG20ww-Chimera fusion; CsPT4-CsPT7) | | |
| t721431 | Library | 230 | 329 |
| | (ERG20ww-Chimera fusion; CsPT1-CsPT4) | | |
| t721433 | Library | 231 | 330 |
| | (ERG20ww-Chimera fusion; CsPT4-CsPT7) | | |
| t721435 | Library | 232 | 331 |
| | (ERG20ww-Chimera fusion; CsPT4-CsPT7) | | |
| t721437 | Library | 233 | 332 |
| | (ERG20ww-Chimera fusion; CsPT4- CsPT6- | | |
| | CsPT7) | | |
| t721439 | Library | 234 | 333 |
| | (ERG20ww-Chimera fusion; CsPT1-CsPT4) | | |
| t721441 | Library | 235 | 334 |
| | (ERG20ww-Chimera fusion; CsPT4-CsPT7) | | |
| t721443 | Library | 236 | 335 |
| | (ERG20ww-Chimera fusion; CsPT4-CsPT7) | | |
| t721445 | Library | 237 | 336 |
| | (ERG20ww-Chimera fusion: CsPT4-CsPT6- | | |
| | CsPT7) | | |
| t721447 | Library | 238 | 337 |
| | (ERG20ww-Chimera fusion: CsPT4-CsPT7) | | |
| t721449 | Library | 239 | 338 |
| | (ERG20ww-Chimera fusion; CsPT1-CsPT4) | | |
| t721451 | Library | 240 | 339 |
| | (ERG20ww-Chimera fusion: CsPT1-CsPT4) | | |
| t721453 | Library | 241 | 340 |
| | (ERG20ww-Chimera fusion; CsPT4-CsPT7) | | |
| t721455 | Library | 242 | 341 |
| | (ERG20ww-Chimera fusion; CsPT1-CsPT4) | | |
| t721457 | Library | 243 | 342 |
| | (ERG20ww-Chimera fusion; CsPT4-CsPT7) | | |
| t721459 | Library | 244 | 343 |
| | (ERG20ww-Chimera fusion; CsPT1-CsPT4) | | |
| t721461 | Library | 245 | 344 |
| | (ERG20ww-Chimera fusion; CsPT4-CsPT7) | | |
| t721463 | Library | 246 | 345 |
| | (ERG20ww-Chimera fusion; CsPT1-CsPT4- | | |
| | CsPT6) | | |
| t721465 | Library | 247 | 346 |
| | (ERG20ww-Chimera fusion; CsPT4-CsPT7) | | |
| t721467 | Library | 248 | 347 |
| | (ERG20ww-Chimera fusion; CsPT4-CsPT7) | | |
| t721469 | Library | 249 | 348 |
| | (ERG20ww-Chimera fusion; CsPT1-CsPT4) | | |
| t721471 | Library | 250 | 349 |
| | (ERG20ww-Chimera fusion; CsPT4-CsPT7) | | |
| t721473 | Library | 251 | 350 |
| | (ERG20ww-Chimera fusion; CsPT1-CsPT4- | | |
| | CsPT6) | | |
| t721475 | Library | 252 | 351 |
| | (ERG20ww-Chimera fusion; CsPT4-CsPT7) | | |
| t721477 | Library | 253 | 352 |
| | (ERG20ww-Chimera fusion; CsPT1-CsPT4) | | |
| t721479 | Library | 254 | 353 |
| | (ERG20ww-Chimera fusion; CsPT4-CsPT7) | | |
| t721481 | Library | 255 | 354 |
| | (ERG20ww-Chimera fusion; CsPT1-CsPT4- | | |
| | CsPT6) | | |
| t721483 | Library | 256 | 355 |
| | (ERG20ww-Chimera fusion; CsPT4-CsPT7) | | |
| t721485 | Library | 257 | 356 |
| | (ERG20ww-Chimera fusion; CsPT4-CsPT7) | | |
| t721487 | Library | 258 | 357 |
| | (ERG20ww-Chimera fusion; CsPT1-CsPT4) | | |
| t721489 | Library | 259 | 358 |
| | (ERG20ww-Chimera fusion; CsPT1-CsPT4- | | |
| | CsPT6) | | |
| t721491 | Library | 260 | 359 |
| | (ERG20ww-Chimera fusion; CsPT4-CsPT7) | | |
| t721493 | Library | 261 | 360 |
| | (ERG20ww-Chimera fusion; CsPT4-CsPT7) | | |
| t721495 | Library | 262 | 361 |
| | (ERG20ww-Chimera fusion; CsPT1-CsPT4) | | |
| t721497 | Library | 263 | 362 |
| | (ERG20ww-Chimera fusion; CsPT1-CsPT4) | | |
| t721499 | Library | 264 | 363 |
| | (ERG20ww-Chimera fusion; CsPT4-CsPT7) | | |
| t721501 | Library | 265 | 364 |
| | (ERG20ww-Chimera fusion; CsPT4-CsPT7) | | |
| t721503 | Library | 266 | 365 |
| | (ERG20ww-Chimera fusion; CsPT1-CsPT4) | | |
| t721505 | Library | 267 | 366 |
| | (ERG20ww-Chimera fusion: CsPT1-CsPT4) | | |
| t721507 | Library | 268 | 367 |
| | (ERG20ww-Chimera fusion; CsPT4-CsPT7) | | |
| t721509 | Library | 269 | 368 |
| | (ERG20ww-Chimera fusion; CsPT4-CsPT7) | | |
| t721511 | Library | 270 | 369 |
| | (ERG20ww-Chimera fusion; CsPT1-CsPT4) | | |
| t721513 | Library | 271 | 370 |
| | (ERG20ww-Chimera fusion; CsPT1-CsPT4) | | |
| t721515 | Library | 272 | 371 |
| | (ERG20ww-Chimera fusion; CsPT4-CsPT7) | | |
| t721517 | Library | 273 | 372 |
| | (ERG20ww-Chimera fusion; CsPT4-CsPT7) | | |
| t721519 | Library | 274 | 373 |
| | (ERG20ww-Chimera fusion; CsPT1-CsPT4) | | |
| t721521 | Library | 275 | 374 |
| | (ERG20ww-Chimera fusion; CsPT1-CsPT4) | | |
| t721523 | Library | 276 | 375 |
| | (ERG20ww-Chimera fusion; CsPT4-CsPT7) | | |
| t721525 | Library | 277 | 376 |
| | (ERG20ww-Chimera fusion; CsPT4-CsPT7) | | |
| t721527 | Library | 278 | 377 |
| | (ERG20ww-Chimera fusion; CsPT1-CsPT4) | | |
| t721529 | Library | 279 | 378 |
| | (ERG20ww-Chimera fusion; CsPT4-CsPT7) | | |
| t721531 | Library | 280 | 379 |
| | (ERG20ww-Chimera fusion; CsPT1-CsPT4) | | |
| t721533 | Library | 281 | 380 |
| | (ERG20ww-Chimera fusion; CsPT4-CsPT7) | | |
| t721535 | Library | 282 | 381 |
| | (ERG20ww-Chimera fusion; CsPT4-CsPT7) | | |
| t721537 | Library | 283 | 382 |
| | (ERG20ww-Chimera fusion; CsPT4-CsPT7) | | |
| t721539 | Library | 284 | 383 |
| | (ERG20ww-Chimera fusion; CsPT1-CsPT4) | | |
| t721541 | Library | 285 | 384 |
| | (ERG20ww-Chimera fusion; CsPT1-CsPT4) | | |
| t721543 | Library | 286 | 385 |
| | (ERG20ww-Chimera fusion; CsPT4-CsPT7) | | |
| t721545 | Library | 287 | 386 |
| | (ERG20ww-Chimera fusion; CsPT4-CsPT7) | | |
| t721547 | Library | 288 | 387 |
| | (ERG20ww-Chimera fusion; CsPT1-CsPT4) | | |
| t721549 | Library | 289 | 388 |
| | (ERG20ww-Chimera fusion; CsPT1-CsPT4) | | |
| t721551 | Library | 290 | 389 |
| | (ERG20ww-Chimera fusion; CsPT4-CsPT7) | | |
| t721553 | Library | 291 | 390 |
| | (ERG20ww-Chimera fusion; CsPT1-CsPT4) | | |
| t721555 | Library | 292 | 391 |
| | (ERG20ww-Chimera fusion; CsPT4-CsPT7) | | |
| t721557 | Library | 293 | 392 |
| | (ERG20ww-Chimera fusion; CsPT1-CsPT4) | | |
| t721559 | Library | 294 | 393 |
| | (ERG20ww-Chimera fusion; CsPT4-CsPT7) | | |
| t721561 | Library | 295 | 394 |
| | (ERG20ww-Chimera fusion; CsPT4-CsPT7) | | |
| t721563 | Library | 296 | 395 |
| | (ERG20ww-Chimera fusion; CsPT1-CsPT4) | | |
| t721565 | Library | 297 | 396 |
| | (ERG20ww-Chimera fusion; CsPT1-CsPT4) | | |
| t721567 | Library | 298 | 397 |
| | (ERG20ww-Chimera fusion; CsPT4-CsPT7) | | |
| t721569 | Library | 299 | 398 |
| | (ERG20ww-Chimera fusion; CsPT4-CsPT7) | | |
| t721573 | Library | 300 | 399 |
| | (ERG20ww-Chimera fusion; CsPT1-CsPT4) | | |
| t721575 | Library | 301 | 400 |
| | (ERG20ww-Chimera fusion; CsPT4-CsPT7) | | |
| t721579 | Library | 302 | 401 |
| | (ERG20ww-Chimera fusion; CsPT1-CsPT4) | | |
| t721581 | Library | 303 | 402 |
| | (ERG20ww-Chimera fusion; CsPT1-CsPT4) | | |
| t721583 | Library | 304 | 403 |
| | (ERG20ww-Chimera fusion; CsPT4-CsPT7) | | |
| t721585 | Library | 305 | 404 |
| | (ERG20ww-Chimera fusion; CsPT4-CsPT7) | | |
| t721589 | Library | 306 | 405 |
| | (ERG20ww-Chimera fusion; CsPT1-CsPT4) | | |
| t721591 | Library | 307 | 406 |
| | (ERG20ww-Chimera fusion: CsPT4-CsPT7) | | |
| t721593 | Library | 308 | 407 |
| | (ERG20ww-Chimera fusion; CsPT4-CsPT7) | | |
| t721595 | Library | 309 | 408 |
| | (ERG20ww-Chimera fusion; CsPT1-CsPT4) | | |
| t721597 | Library | 310 | 409 |
| | (ERG20ww-Chimera fusion; CsPT1-CsPT4) | | |
| t721599 | Library | 311 | 410 |
| | (ERG20ww-Chimera fusion: CsPT4-CsPT7) | | |
| t721601 | Library | 312 | 411 |
| | (ERG20ww-Chimera fusion; CsPT4-CsPT7) | | |
| t721605 | Library | 313 | 412 |
| | (ERG20ww-Chimera fusion; CsPT1-CsPT4) | | |
| t721607 | Library | 314 | 413 |
| | (ERG20ww-Chimera fusion; CsPT4-CsPT7) | | |
| t721609 | Library | 315 | 414 |
| | (ERG20ww-Chimera fusion; CsPT4-CsPT7) | | |
| t721611 | Library | 316 | 415 |
| | (ERG20ww-Chimera fusion; CsPT1-CsPT4) | | |
| t721613 | Library | 317 | 416 |
| | (ERG20ww-Chimera fusion; CsPT4-CsPT7) | | |
| t721615 | Library | 318 | 417 |
| | (ERG20ww-Chimera fusion; CsPT4-CsPT7) | | |
| t721617 | Library | 319 | 418 |
| | (ERG20ww-Chimera fusion; CsPT4-CsPT7) | | |
| t721619 | Library | 320 | 419 |
| | (ERG20ww-Chimera fusion; CsPT1-CsPT4) | | |
| t721629 | Library | 321 | 420 |
| | (ERG20ww-Chimera fusion; CsPT4-CsPT7) | | |
| t721631 | Library | 322 | 421 |
| | (ERG20ww-Chimera fusion; CsPT4-CsPT7) | | |
| t721633 | Library | 323 | 422 |
| | (ERG20ww-Chimera fusion; CsPT1-CsPT4) | | |
| t721639 | Library | 324 | 423 |
| | (ERG20ww-Chimera fusion; CsPT4-CsPT7) | | |

TABLE 17
ERG20 homolog sequences associated with chimeric
fusion library described in Example 6

| | | Protein | Nucleic Acid |
|---|---|---|---|
| Strain | Strain type | SEQ ID NO: | SEQ ID NO: |
| t756346 | ERG20 Positive Control | 424 | 477 |
| t756349 | ERG20ww Positive Control | 425 | 478 |
| t766132 | Library | 426 | 479 |
| t766504 | Library | 427 | 480 |
| t766593 | Library | 428 | 481 |
| t766467 | Library | 429 | 482 |
| t766152 | Library | 430 | 483 |
| t766629 | Library | 431 | 484 |
| t767697 | Library | 432 | 485 |
| t766672 | Library | 433 | 486 |
| t766111 | Library | 434 | 487 |
| t766340 | Library | 435 | 488 |
| t766148 | Library | 436 | 489 |
| t766308 | Library | 437 | 490 |
| t765947 | Library | 438 | 491 |
| t765987 | Library | 439 | 492 |
| t767109 | Library | 440 | 493 |
| t766404 | Library | 441 | 494 |
| t768423 | Library | 442 | 495 |
| t767236 | Library | 443 | 496 |
| t766101 | Library | 444 | 497 |
| t765981 | Library | 445 | 498 |
| t767135 | Library | 446 | 499 |
| t766263 | Library | 447 | 500 |
| t766601 | Library | 448 | 501 |
| t767176 | Library | 449 | 502 |
| t766406 | Library | 450 | 503 |
| t768409 | Library | 451 | 504 |
| t766650 | Library | 452 | 505 |
| t766129 | Library | 453 | 506 |
| t766740 | Library | 454 | 507 |
| t765825 | Library | 455 | 508 |
| t766639 | Library | 456 | 509 |
| t765979 | Library | 457 | 510 |
| t767808 | Library | 458 | 513 |
| t767611 | Library | 459 | 512 |
| t766017 | Library | 460 | 513 |
| t766201 | Library | 461 | 514 |
| t765881 | Library | 462 | 515 |
| t766011 | Library | 463 | 516 |
| t766043 | Library | 464 | 517 |
| t766077 | Library | 465 | 518 |
| t766103 | Library | 466 | 519 |
| t766115 | Library | 467 | 520 |
| t766304 | Library | 468 | 521 |
| t768416 | Library | 469 | 522 |
| t765857 | Library | 470 | 523 |
| t768386 | Library | 471 | 524 |
| t766051 | Library | 472 | 525 |
| t765739 | Library | 473 | 526 |
| t766094 | Library | 474 | 527 |
| t768404 | Library | 475 | 528 |
| t766095 | Library | 476 | 529 |
| t766469 | Library | 753 | 754 |

TABLE 18
ERG20w homolog - Chimeric PT fusion library
sequences described in Example 6

| | | Protein | Nucleic Acid |
|---|---|---|---|
| Strain | Strain type | SEQ ID NO: | SEQ ID NO: |
| t756346 | ERG20 Positive Control | 530 | 583 |
| t756349 | ERG20ww Positive Control | 531 | 584 |
| t766132 | Library | 532 | 585 |
| t766504 | Library | 533 | 586 |
| t766593 | Library | 534 | 587 |
| t766467 | Library | 535 | 588 |
| t766152 | Library | 536 | 589 |
| t766629 | Library | 537 | 590 |
| t767697 | Library | 538 | 591 |
| t766672 | Library | 539 | 592 |
| t766111 | Library | 540 | 593 |
| t766340 | Library | 541 | 594 |
| t766148 | Library | 542 | 595 |
| t766308 | Library | 543 | 596 |
| t765947 | Library | 544 | 597 |
| t765987 | Library | 545 | 598 |
| t767109 | Library | 546 | 599 |
| t766404 | Library | 547 | 600 |
| t768423 | Library | 548 | 601 |
| t767236 | Library | 549 | 602 |
| t766101 | Library | 550 | 603 |
| t765981 | Library | 551 | 604 |
| t767135 | Library | 552 | 605 |
| t766263 | Library | 553 | 606 |
| t766601 | Library | 554 | 607 |
| t767176 | Library | 555 | 608 |
| t766406 | Library | 556 | 609 |
| t768409 | Library | 557 | 610 |
| t766650 | Library | 558 | 611 |
| t766129 | Library | 559 | 612 |
| t766740 | Library | 560 | 613 |
| t765825 | Library | 561 | 614 |
| t766639 | Library | 562 | 615 |
| t765979 | Library | 563 | 616 |
| t767808 | Library | 564 | 617 |
| t767611 | Library | 565 | 618 |
| t766017 | Library | 566 | 619 |
| t766201 | Library | 567 | 620 |
| t765881 | Library | 568 | 621 |
| t766011 | Library | 569 | 622 |
| t766043 | Library | 570 | 623 |
| t766077 | Library | 571 | 624 |
| t766103 | Library | 572 | 625 |
| t766115 | Library | 573 | 626 |
| t766304 | Library | 574 | 627 |
| t768416 | Library | 575 | 628 |
| t765857 | Library | 576 | 629 |
| t768386 | Library | 577 | 630 |
| t766051 | Library | 578 | 631 |
| t765739 | Library | 579 | 632 |
| t766094 | Library | 580 | 633 |
| t768404 | Library | 581 | 634 |
| t766095 | Library | 582 | 635 |
| t766469 | Library | 755 | 756 |

TABLE 19
Prenyltransferase sequences associated with Example 7

| | Strain type | PT Protein | PT Nucleic Acid |
|---|---|---|---|
| Strain | PT type | SEQ ID NO: | SEQ ID NO: |
| t817911 | Library | 757 | 869 |
| | (CsPT4-CsPT7 chimera; C31F F82G D94E F245R) | | |
| t817917 | Library | 758 | 870 |
| | (CsPT4-CsPT7 chimera; M43L I86S I147L F245R) | | |
| t817954 | Library | 759 | 871 |
| | (CsPT4-CsPT1 chimera; C31F M43V M87V D94E | | |
| | E113R F145L F245W Q267F Q288R) | | |
| t817955 | Library | 760 | 872 |
| | (CsPT4-CsPT1 chimera; C31F M43L F82G D94E | | |
| | E113R F14ST F245R Q267F Q288R) | | |
| t817960 | Library | 761 | 873 |
| | (CsPT4-CsPT1 chimera; M43L F82G D94E E113R | | |
| | F145S F245R Q267F Q288R L311K) | | |
| t817962 | Library | 762 | 874 |
| | (CsPT4-CsPT1 chimera: C31F M43V M87V D94E | | |
| | E113R F245R Q267F Q288R L311N) | | |
| t817963 | Library | 763 | 875 |
| | (CsPT4-CsPT7 chimera; I86A D94E I147L F245R) | | |
| t817977 | Library | 764 | 876 |
| | (CsPT4-CsPT1 chimera; C31F I46C I86A D94E | | |
| | E113R F14ST F245R Q267F Q288R) | | |
| t817985 | Library | 765 | 877 |
| | (CsPT4-CsPT1 chimera; C31F M43V M87V D94E | | |
| | F145T F245R Q267F Q288R L311N) | | |
| t817996 | Library | 766 | 878 |
| | (CsPT4-CsPT1 chimera: C31F I86G D94E E113R | | |
| | F145T F245W Q267F Q288R L311N) | | |
| t818002 | Library | 767 | 879 |
| | (CsPT4-CsPT7 chimera; I86V F245R) | | |
| t818007 | Library | 768 | 880 |
| | (CsPT4-CsPT1 chimera; C31F I46C I86G D94E | | |
| | E113R F245R Q267F Q288R L311N) | | |
| t818009 | Library | 769 | 881 |
| | (CsPT4-CsPT1 chimera; C31F M43V M87V D94B | | |
| | E113R F145L F245R Q288R L311R) | | |
| t818014 | Library | 770 | 882 |
| | (CsPT4-CsPT7 chimera; C31F M43L I86A I147L) | | |
| t818015 | Library | 771 | 883 |
| | (CsPT4-CsPT7 chimera; I86S D94E F245R) | | |
| t818033 | Library | 772 | 884 |
| | (CsPT4-CsPT1 chimera; C31F M43L I86S D94E | | |
| | E113R F145S F245R Q267F L311K) | | |
| t818043 | Library | 773 | 885 |
| | (CsPT4-CsPT7 Chimera; C31F M43L I86V D94E) | | |
| t818044 | Library | 774 | 886 |
| | (CsPT4-CsPT1 Chimera; C31F I46C F82G D94E | | |
| | E113R I147L Q267F Q288R L311N) | | |
| t818058 | Library | 775 | 887 |
| | (CsPT4-CsPT7 Chimera; C31F M43L I86A F245R) | | |
| t818067 | Library | 776 | 888 |
| | (CsPT4-CsPT7 Chimera; C31F I86A F245R) | | |
| t818093 | Library | 777 | 889 |
| | (CsPT4-CsPT1 Chimera; C31F M43L I86S E113R | | |
| | F145L F245R Q267F Q288R L311R) | | |
| t818098 | Library | 778 | 890 |
| | (CsPT4-CsPT1 Chimera; C31F I46C M87V D94E | | |
| | E113R F145L Q267F Q288R L311N) | | |
| t818130 | Library | 779 | 891 |
| | (CsPT4-CsPT7 Chimera; I86S D94E) | | |
| t818140 | Library | 780 | 892 |
| | (CsPT4-CsPT7 Chimera; I86T M87I F151T) | | |
| t818171 | Library | 781 | 893 |
| | (CsPT4-CsPT7 Chimera; M43L I86S D94E) | | |
| t818180 | Library | 782 | 894 |
| | (CsPT4-CsPT7 Chimera; F83Y I86A M87T) | | |
| t818195 | Library | 783 | 895 |
| | (CsPT4-CsPT1 Chimera; C31F M43L F82G I86G | | |
| | D94E F145L I147L F245R L311N) | | |
| t818196 | Library | 784 | 896 |
| | (CsPT4-CsPT7 Chimera; I86V M87T) | | |
| t818198 | Library | 785 | 897 |
| | (CsPT4-CsPT7 Chimera; I86V I147L F245R) | | |
| t818205 | Library | 786 | 898 |
| | (CsPT4-CsPT7 Chimera; C31F I86V D94E I147L) | | |
| t818206 | Library | 787 | 899 |
| | (CsPT4-CsPT1 Chimera; C31F I46C I86A E113R | | |
| | I147L F245W Q267F Q288R L311N) | | |
| t818207 | Library | 788 | 900 |
| | (CsPT4-CsPT7 Chimera; I86A M87I) | | |
| t818208 | Library | 789 | 901 |
| | (CsPT4-CsPT1 Chimera; C31F M43L I86A D94E | | |
| | E113R F145S F245R Q267F L311K) | | |
| t818210 | Library | 790 | 902 |
| | (CsPT4-CsPT1 Chimera; C31F M43L I86G D94E | | |
| | E113R F145L F245R Q288R L311R) | | |
| t818214 | Library | 791 | 903 |
| | (CsPT4-CsPT7 Chimera; M43L I86A D94E) | | |
| t818215 | Library | 792 | 904 |
| | (CsPT4-CsPT1 Chimera; C31F I46C I86G D94E | | |
| | E113R F145L F245R Q288R L311N) | | |
| t818223 | Library | 793 | 905 |
| | (CsPT4-CsPT1 Chimera; C31F M43V I86G E113R | | |
| | F145L F245R Q267F Q288R L311K) | | |
| t818230 | Library | 794 | 906 |
| | (CsPT4-CsPT1 Chimera; C31F F82G I86V M87V | | |
| | D94E F145L I147L F245R L311K) | | |
| t818247 | Library | 795 | 907 |
| | (CsPT4-CsPT7 Chimera; I86A D94E I147L) | | |
| t818248 | Library | 796 | 908 |
| | (CsPT4-CsPT7 Chimera; I86A D94E) | | |
| t818257 | Library | 797 | 909 |
| | (CsPT4-CsPT7 Chimera; F83Y I86A M87I F151T) | | |
| t818260 | Library | 798 | 910 |
| | (CsPT4-CsPT7 Chimera; I86A M87V S119A F151G) | | |
| t818375 | Library | 799 | 911 |
| | (CsPT4-CsPT7 Chimera; I86A S119A) | | |
| t818379 | Library | 800 | 912 |
| | (CsPT4-CsPT7 Chimera; M43L I86S M87V) | | |
| t818383 | Library | 801 | 913 |
| | (CsPT4-CsPT7 Chimera; I86T S119A F151T) | | |
| t818388 | Library | 802 | 914 |
| | (CsPT4-CsPT7 Chimera; C31F F82G) | | |
| t818392 | Library | 803 | 915 |
| | (CsPT4-CsPT7 Chimera; C31F M43L I86A D94E) | | |
| t818408 | Library | 804 | 916 |
| | (CsPT4-CsPT7 Chimera; C31F I86V D94E) | | |
| t818426 | Library | 805 | 917 |
| | (CsPT4-CsPT7 Chimera; I86G F245R) | | |
| t818427 | Library | 806 | 918 |
| | (CsPT4-CsPT7 Chimera; M43L I86S F245R) | | |
| t818547 | Library | 807 | 919 |
| | (CsPT4-CsPT7 Chimera; I86T M87T) | | |
| t818555 | Library | 808 | 920 |
| | (CsPT4-CsPT1 Chimera; C31F M43L I86A D94E | | |
| | E113R I147L F245R Q267F Q288R) | | |
| t818565 | Library | 809 | 921 |
| | (CsPT4-CsPT1 Chimera; C31F M43L I86V M87V | | |
| | D94E F145L I147L F245R L311N) | | |
| t818573 | Library | 810 | 922 |
| | (CsPT4-CsPT1 Chimera; C31F M43L I86S M87V | | |
| | D94E F145L I147L F245R L311K) | | |
| t818606 | Library | 811 | 923 |
| | (CsPT4-CsPT1 Chimera; C31F I46C F82G D94E | | |
| | E113R F145L Q267F Q288R L311N) | | |
| t818614 | Library | 812 | 924 |
| | (CsPT4-CsPT7 Chimera; I86G D94E) | | |
| t818626 | Library | 813 | 925 |
| | (CsPT4-CsPT7 Chimera; F82G V122F) | | |
| t818726 | Library | 814 | 926 |
| | (CsPT4-CsPT1 Chimera; C31F M43L F82G E113R | | |
| | F145S F245R Q267F Q288R L311R) | | |
| t818728 | Library | 815 | 927 |
| | (CsPT4-CsPT1 Chimera; C31F M43L I86S D94E | | |
| | E113R F245R Q267F Q288R L311K) | | |
| t818733 | Library | 816 | 928 |
| | (CsPT4-CsPT1 Chimera; C31F M43V M87V D94E | | |
| | E113R F145T F245R Q267F L311N) | | |
| t818738 | Library | 817 | 929 |
| | (CsPT4-CsPT1 Chimera; C31F F82G I86V M87V | | |
| | D94E F145L I147L F245R L311N) | | |
| t818739 | Library | 818 | 930 |
| | (CsPT4-CsPT7 Chimera; C31F I86A D94E F245R) | | |
| t818742 | Library | 819 | 931 |
| | (CsPT4-CsPT1 Chimera; I46C F82G D94E E113R | | |
| | I147L F245R Q267F Q288R L311N) | | |
| t818743 | Library | 820 | 932 |
| | (CsPT4-CsPT1 Chimera; C31F M43L I86G M87V | | |
| | D94E F145L I147L F245R L311N) | | |
| t818744 | Library | 821 | 933 |
| | (CsPT4-CsPT1 Chimera; M43L I86A D94E E113R | | |
| | I147L F245R Q267F Q288R L311N) | | |
| t818745 | Library | 822 | 934 |
| | (CsPT4-CsPT7 Chimera; M43L I86S) | | |
| t818758 | Library | 823 | 935 |
| | (CsPT4-CsPT1 Chimera; M43L F82G I86V M87V | | |
| | D94E F145L I147L F245R L311N) | | |
| t818759 | Library | 824 | 936 |
| | (CsPT4-CsPT7 Chimera; C31F I86V M87V) | | |
| t818763 | Library | 825 | 937 |
| | (CsPT4-CsPT7 Chimera; I86G V122S) | | |
| t818767 | Library | 826 | 938 |
| | (CsPT4-CsPT1 Chimera; C31F M43V F82G D94E | | |
| | E113R F145S F245R Q288R L311R) | | |
| t818770 | Library | 827 | 939 |
| | (CsPT4-CsPT1 Chimera; C31F M43L F82G D94E | | |
| | E113R F14ST F245R Q267F L311N) | | |
| t818772 | Library | 828 | 940 |
| | (CsPT4-CsPT7 Chimera; F83Y I86T M87V) | | |
| t818781 | Library | 829 | 941 |
| | (CsPT4-CsPT7 Chimera; I86G M87I) | | |
| t818786 | Library | 830 | 942 |
| | (CsPT4-CsPT7 Chimera; C31F F82G D94E I147L) | | |
| t818801 | Library | 831 | 943 |
| | (CsPT4-CsPT7 Chimera; F83Y I86S M871 F151T) | | |
| t818804 | Library | 832 | 944 |
| | (CsPT4-CsPT7 Chimera; I86A V122S) | | |
| t818805 | Library | 833 | 945 |
| | (CsPT4-CsPT7 Chimera; I86T S119A) | | |
| t818806 | Library | 834 | 946 |
| | (CsPT4-CsPT1 Chimera; C31F I46C I86A D94E | | |
| | E113R I147L Q267F Q288R L311N) | | |
| t818810 | Library | 835 | 947 |
| | (CsPT4-CsPT1 Chimera; C31F I46C I86S D94E | | |
| | E113R I147L F245R Q288R L311R) | | |
| t818836 | Library | 836 | 948 |
| | (CsPT4-CsPT1 Chimera; C31F I46C M87V D94E | | |
| | E113R F145T F245R Q288R L311R) | | |
| t818843 | Library | 837 | 949 |
| | (CsPT4-CsPT1 Chimera; C31F F82G I86V M87V | | |
| | D94E F145L I147L F245R L311R) | | |
| t818844 | Library | 838 | 950 |
| | (CsPT4-CsPT7 Chimera; M43L I147L F245R) | | |
| t818877 | Library | 839 | 951 |
| | (CsPT4-CsPT7 Chimera; F83Y I86A M87T F151T) | | |
| t818880 | Library | 840 | 952 |
| | (CsPT4-CsPT7 Chimera; I86A M87V I147L) | | |
| t818893 | Library | 841 | 953 |
| | (CsPT4-CsPT7 Chimera; I86V M87T S119A) | | |
| t818902 | Library | 842 | 954 |
| | (CsPT4-CsPT7 Chimera; F83Y I86G F151T) | | |
| t818911 | Library | 843 | 955 |
| | (CsPT4-CsPT7 Chimera; C31F I86V D94E F245R) | | |
| t818922 | Library | 844 | 956 |
| | (CsPT4-CsPT7 Chimera: F82G F245R) | | |
| t818975 | Library | 845 | 957 |
| | (CsPT4-CsPT1 Chimera; C31F M43L F82G I86V | | |
| | D94E F145L I147L F245R L311N) | | |
| t818980 | Library | 846 | 958 |
| | (CsPT4-CsPT7 Chimera; F82G D94E I147L) | | |
| t818982 | Library | 847 | 959 |
| | (CsPT4-CsPT1 Chimera; C31F M43L I86S M87V | | |
| | D94E F145L I147L F245R L311R) | | |
| t818989 | Library | 848 | 960 |
| | (CsPT4-CsPT1 Chimera; C31F M43L I86G D94E | | |
| | E113R F145S Q267F Q288R L311N) | | |
| t819008 | Library | 849 | 961 |
| | (CsPT4-CsPT7 Chimera; I86G D94E I147L F245R) | | |
| t819030 | Library | 850 | 962 |
| | (CsPT4-CsPT1 Chimera; C31F M43L I86S M87V | | |
| | D94E F145L I147L F245R L311N) | | |
| t819037 | Library | 851 | 963 |
| | (CsPT4-CsPT7 Chimera; F83Y I86S M87V F151T) | | |
| t819066 | Library | 852 | 964 |
| | (CsPT4-CsPT7 Chimera; I86V M87I S119A F151T) | | |
| t819073 | Library | 853 | 965 |
| | (CsPT4-CsPT7 Chimera; M43L I86G D94E F245R) | | |
| t819074 | Library | 854 | 966 |
| | (CsPT4-CsPT7 Chimera; F82G I86T V122F) | | |
| t819122 | Library | 855 | 967 |
| | (CsPT4-CsPT1 Chimera; C31F M87V D94E E113R | | |
| | F145T F245W Q267F Q288R L311K) | | |
| t819126 | Library | 856 | 968 |
| | (CsPT4-CsPT1 Chimera; C31F M43V D94E E113R | | |
| | I147L F245W Q267F Q288R L311R) | | |
| t819132 | Library | 857 | 969 |
| | (CsPT4-CsPT1 Chimera; M43L F82G D94E E113R | | |
| | I147L F245R Q267F Q288R L311K) | | |
| t819161 | Library | 858 | 970 |
| | (CsPT4-CsPT7 Chimera; C31F M43L I86S D94E) | | |
| t819169 | Library | 859 | 971 |
| | (CsPT4-CsPT7 Chimera; C31F F82G I147L) | | |
| t819172 | Library | 860 | 972 |
| | (CsPT4-CsPT7 Chimera; C31F F82G D94E) | | |
| t819173 | Library | 861 | 973 |
| | (CsPT4-CsPT7 Chimera; C31F M43L D94E F245R) | | |
| t819179 | Library | 862 | 974 |
| | (CsPT4-CsPT7 Chimera; I86A M87V) | | |
| t819193 | Library | 863 | 975 |
| | (CsPT4-CsPT7 Chimera; I86T M87V F151G) | | |
| t819225 | Library | 864 | 976 |
| | (CsPT4-CsPT7 Chimera; C31F I86V M87V I147L) | | |
| t819336 | Library | 865 | 977 |
| | (CsPT4-CsPT1 ChimeraC31F I46C I86S D94E F145S | | |
| | F245W Q267F Q288R L311R) | | |
| t819343 | Library | 866 | 978 |
| | (CsPT4-CsPT1 Chimera; C31F I46C I86A D94E | | |
| | I147L F245R Q267F Q288R L311K) | | |
| t819372 | Library | 867 | 979 |
| | (CsPT4-CsPT1 Chimera; C31F M43V M87V D94E | | |
| | E113R F145S Q267F Q288R L311R) | | |
| t819375 | Library | 868 | 980 |
| | (CsPT4-CsPT7 Chimera; I86V D94E I147L F245R) | | |

TABLE 20
Prenyltransferase sequences associated with Example 8

| | Strain type | PT Protein | PT Nucleic Acid |
|---|---|---|---|
| Strain | PT type | SEQ ID NO: | SEQ ID NO: |
| t880043 | Library | 982 | 1083 |
| | (CsPT1-CsPT4 chimera; T30A L34F M43L S45L I86A | | |
| | M87I D94E E113R V140I I142L I147L A149L S182V | | |
| | G211S M212I V234L R241K F245R V250L L256V | | |
| | S258A I264N Q267F Q288R L311N) | | |
| t879667 | Library | 983 | 1084 |
| | (CsPT4-CsPT7 chimera; F82G D94E I147L A227R) | | |
| t879993 | Library | 984 | 1085 |
| | (CsPT4-CsPT7 chimera; V39T F82G D94E I147L) | | |
| t879001 | Library | 985 | 1086 |
| | (CsPT4-CsPT7 chimera; F82G D94E I140T I147L) | | |
| t879539 | Library | 986 | 1087 |
| | (CsPT4-CsPT7 chimera; F82G D94E I147L V246L) | | |
| t879989 | Library | 987 | 1088 |
| | (CsPT4-CsPT7 chimera; F82G D94E I147L A262G) | | |
| t879340 | Library | 988 | 1089 |
| | (CsPT4-CsPT7 chimera; F82G D94E I147L A227K | | |
| | T254N) | | |
| t880030 | Library | 989 | 1090 |
| | (CsPT4-CsPT7 chimera; F82G D94E I147L L204I) | | |
| t879474 | Library | 990 | 1091 |
| | (CsPT4-CsPT7 chimera; M75V F82G D94E I147L | | |
| | T254N) | | |
| t879791 | Library | 991 | 1092 |
| | (CsPT4-CsPT7 chimera; F82G D94E I147L T254L) | | |
| t879562 | Library | 992 | 1093 |
| | (CsPT4-CsPT7 chimera; F82G D94E I147L T254N) | | |
| t880029 | Library | 993 | 1094 |
| | (CsPT1-CsPT4 chimera; T30A M43L I86A D94E | | |
| | E113R I121S V129I F141S I147L F148L A149L T171I | | |
| | S173L S182V G211S M212L T213V R241K F245R | | |
| | V247C V250L Q267F I286F Q288R L311N) | | |
| t879750 | Library | 994 | 1095 |
| | (CsPT4-CsPT7 chimera; L62I F82G D94E I147L) | | |
| t879685 | Library | 995 | 1096 |
| | (CsPT4-CsPT7 chimera; L68F F82G D94E I147L) | | |
| t879512 | Library | 996 | 1097 |
| | (CsPT4-CsPT7 chimera; F82G D94E I147L T254N | | |
| | S257G) | | |
| t879297 | Library | 997 | 1098 |
| | (CsPT4-CsPT7 chimera; F82G D94E I147L 1172F) | | |
| t879827 | Library | 998 | 1099 |
| | (CsPT4-CsPT7 chimera; F82G D94E I147L T213V | | |
| | T254N) | | |
| t879670 | Library | 999 | 1100 |
| | (CsPT4-CsPT7 chimera; F82G D94E I147L I172L) | | |
| t879624 | Library | 1000 | 1101 |
| | (CsPT4-CsPT7 chimera; F82G D94E I147L V250I | | |
| | T254N) | | |
| t879758 | Library | 1001 | 1102 |
| | (CsPT4-CsPT7 chimera; F82G D94E I147L R241K) | | |
| t879503 | Library | 1002 | 1103 |
| | (CsPT4-CsPT7 chimera; F82G D94E I147L L275I) | | |
| t879068 | Library | 1003 | 1104 |
| | (CsPT4-CsPT7 chimera; F82G D94E I147L V250T | | |
| | T254N) | | |
| t879840 | Library | 1004 | 1105 |
| | (CsPT4-CsPT7 chimera; F82G D94E I147L L260I) | | |
| t879356 | Library | 1005 | 1106 |
| | (CsPT4-CsPT7 chimera; F82G D94E I147L P199A) | | |
| t879725 | Library | 1006 | 1107 |
| | (CsPT4-CsPT7 chimera; F82G D94E I147L M196L) | | |
| t879071 | Library | 1007 | 1108 |
| | (CsPT4-CsPT7 chimera; F82G D94E I117L I147) | | |
| t879768 | Library | 1008 | 1109 |
| | (CsPT4-CsPT7 chimera; F82G D94E I147L C284W) | | |
| t879836 | Library | 1009 | 1110 |
| | (CsPT4-CsPT7 chimera; F82G D94E I147L V250I) | | |
| t880054 | Library | 1010 | 1111 |
| | (CsPT4-CsPT7 chimera; F82G D94E I147L A227K) | | |
| t879626 | Library | 1011 | 1112 |
| | (CsPT4-CsPT7 chimera; F82G D94E I147L F151I) | | |
| t879983 | Library | 1012 | 3133 |
| | (CsPT4-CsPT7 chimera; F82G D94E I147L V209L) | | |
| t879726 | Library | 1013 | 1114 |
| | (CsPT4-CsPT7 chimera; F82G D94E I147L A152D) | | |
| t879529 | Library | 1014 | 1115 |
| | (CsPT4-CsPT7 chimera; F82G D94E I147L S257G) | | |
| t879304 | Library | 1015 | 1116 |
| | (CsPT4-CsPT7 chimera; F82G D94E I140L I147L) | | |
| t879708 | Library | 1016 | 1117 |
| | (CsPT4-CsPT7 chimera; F82G D94E I147L 1264F) | | |
| t879602 | Library | 1017 | 1118 |
| | (CsPT4-CsPT7 chimera; F82G D94E I147L V247S) | | |
| t879151 | Library | 1018 | 1119 |
| | (CsPT4-CsPT7 chimera; F82G D94E I147L V250A | | |
| | T254N) | | |
| t879382 | Library | 1019 | 1120 |
| | (CsPT4-CsPT7 chimera; F82G D94E II47L V234L) | | |
| t879774 | Library | 1020 | 1121 |
| | (CsPT4-CsPT7 chimera; F82G D94E I147L M196I) | | |
| t879650 | Library | 1021 | 1122 |
| | (CsPT4-CsPT7 chimera; F82G D94E I147L V231I) | | |
| t879418 | Library | 1022 | 1123 |
| | (CsPT4-CsPT7 chimera; F82G D94E I147L V234F) | | |
| t879399 | Library | 1023 | 1124 |
| | (CsPT4-CsPT7 chimera; F82G I86G D94E I147L) | | |
| t879949 | Library | 1024 | 1125 |
| | (CsPT4-CsPT7 chimera; F82G D94E I147L V246D) | | |
| t879660 | Library | 1025 | 1126 |
| | (CsPT4-CsPT7 chimera; F82G D94E I147L T254A) | | |
| t879522 | Library | 1026 | 1127 |
| | (CsPT4-CsPT7 chimera; M75V F82G D94E I147L) | | |
| t879193 | Library | 1027 | 1128 |
| | (CsPT4-CsPT7 chimera; F82G D94E I147L T213V) | | |
| t879977 | Library | 1028 | 1129 |
| | (CsPT1-CsPT4 chimera; L34F M43L I46A G49S I86A | | |
| | M87I D94E M110L E113R V140I F141S I147L A149L | | |
| | I172F G177T A179P A227K V234L F245R L256V | | |
| | S258A Q267F L276F Q288R L311N) | | |
| t879357 | Library | 1029 | 1130 |
| | (CsPT1-CsPT4 chimera; M43L F82G A85N I86G M87I | | |
| | D94E V106A E113R F141S I142L I147L A149L T171I | | |
| | A179N A227K Y229H V234L R241K F245R V250F | | |
| | V257L S258A Q267F Q288R L311K) | | |
| t879819 | Library | 1030 | 1131 |
| | (CsPT4-CsPT7 chimera; M75I F82G D94E I147L) | | |
| t879233 | Library | 1031 | 1132 |
| | (CsPT4-CsPT7 chimera; F82G D94E I147L V234L | | |
| | T254N) | | |
| t879240 | Library | 1032 | 1133 |
| | (CsPT4-CsPT7 chimera; F82G D94E I147L T254C) | | |
| t879205 | Library | 1033 | 1134 |
| | (CsPT4-CsPT7 chimera; F82G D94E I147L F190V) | | |
| t879397 | Library | 1034 | 1135 |
| | (CsPT4-CsPT7 chimera; F82G D94E I147L G177L | | |
| | T254N) | | |
| t879014 | Library | 1035 | 1136 |
| | (CsPT4-CsPT7 chimera; F82G D94E I147L M212I) | | |
| t879150 | Library | 1036 | 1137 |
| | (CsPT1-CsPT4 chimera; T30A V39T M43L F82G | | |
| | A85N M87I D94E E113R V129I V140F I142L I147L | | |
| | A149L TI71I G211T A227K V234L M243T F245R | | |
| | V246I V247C V250L Q267F Q288R L311K) | | |
| t879592 | Library | 1037 | 1138 |
| | (CsPT1-CsPT4 chimera; L34F Q35T M43L G49S I86A | | |
| | D94E D102Y E113R F139L I147L A149L S182V | | |
| | T213V A227R V234L T236V F245R V247G V250L | | |
| | L256V V257G Q267F F283S Q288R L311N) | | |
| t879184 | Library | 1038 | 1139 |
| | (CsPT1-CsPT4 chimera; T30A C31F M43V I46G | | |
| | G49A I86G M87V D94E L105I E113R F139L F141I | | |
| | F145L L169A T171I S173L S182V M210F T213A | | |
| | V234L F245W V250L S258A Q267F Q288R) | | |
| t879918 | Library | 1039 | 1140 |
| | (CsPT1-CsPT4 chimera; T30A C31F M43L S451 A73G | | |
| | V75I I86A M87L D94E M110L E113R I142L I147L | | |
| | G177V M212L K228A V234L N242T F245R V247C | | |
| | V250L V257L S258A Q267F Q288R) | | |
| t879813 | Library | 1040 | 1141 |
| | (CsPT1-CsPT4 chimera; T30A M43L G52A I86A | | |
| | D94E E113R I121S V129L F141S I147L T171I S182V | | |
| | G211A A227R V234F F245R V247C V250L V257G | | |
| | S258A Q267F S271K C284W Q288R L311N) | | |
| t879338 | Library | 1041 | 1142 |
| | (CsPT1-CsPT4 chimera; M43L F82G A85N I86G M87I | | |
| | D94E E113R F141I I147L T171I G177T S182V R197S | | |
| | M212L T213A A227K V234L M243S F245R V250L | | |
| | Q267F L276P F283S Q288R L311K) | | |
| t879042 | Library | 1042 | 1143 |
| | (CsPT1-CsPT4 chimera; M43L I46G F82G M87I D94E | | |
| | V106A M110L E113R V129L I147L A149I T171I | | |
| | A179N M212L Y229F V234L R241K F245R V246I | | |
| | V247C V250L S258A Q267F Q288R L311K) | | |
| t879155 | Library | 1043 | 1144 |
| | (CsPT1-CsPT4 chimera; T30A M43L G49S I86A M87I | | |
| | D94E DI02Y V106A E113R I121S V129L V140L | | |
| | I147L A179N R197S T213V A227K M243T F245R | | |
| | V246L V247C V250L Q267F Q288R L311N) | | |
| t879940 | Library | 1044 | 1145 |
| | (CsPT1-CsPT4 chimera; C31F M43L I86A M87I D94E | | |
| | V106A E113R I121S V129I F139L F141C I147L T171I | | |
| | S1731 A179P M212I A227K V234L R241K F245R | | |
| | V246I V247C Q267F C284F Q288R) | | |
| t879345 | Library | 1045 | 1146 |
| | (CsPT1-CsPT4 chimera; M43L S45L I86A D94E | | |
| | V106A E113R F139A I147L F148L A149L T171I | | |
| | T213V I223V V234L T236V A240V R241K M243T | | |
| | F245R V246L V247C V257G Q267F Q288R L311N) | | |
| t879857 | Library | 1046 | 1147 |
| | (CsPT1-CsPT4 chimera; T30A C31F M43L I86V | | |
| | M87V D94E F139L F141S F145L I147L F148L T171I | | |
| | G177I T181V R197S M207V G211S V234L F245R | | |
| | V246L V247C V250L L276G C284S L311N) | | |
| t879788 | Library | 1047 | 1148 |
| | (CsPT1-CsPT4 chimera; T30A C31F Q35T M43L S45L | | |
| | I46C V75I I86A D94E V106A E113R V129I F139I | | |
| | I147L A149L F151A I172F T213A V234L F245R | | |
| | V246I V250L S258A Q267F Q288R) | | |
| t879606 | Library | 1048 | 1149 |
| | (CsPT4-CsPT7 chimera; L34F M43L S45L F82G I86G | | |
| | D94E E113R F139L V140T I147L G177T A179N | | |
| | S182F M212I A227K M243T F245R V246L V247C | | |
| | V250L S258A Q267F L276F Q288R L311K) | | |
| t879579 | Library | 1049 | 1150 |
| | (CsPT1-CsPT4 chimera; C31F V39T M43V I46G F82A | | |
| | A85N M87V D94E E113R V129L F139L F145L | | |
| | A149L I172L G1771 M210F A227K F245W V246L | | |
| | V247C V257G S258A Q267F C284W Q288R) | | |
| t879488 | Library | 1050 | 11.51 |
| | (CsPT1-CsPT4 chimera; T30A C31F V39T M43V | | |
| | S45L I46G G49C F72A S79L M87V D94E E113R | | |
| | I121S I128L F145L S182V A227K Y229F V234L | | |
| | F245W V247C V250L Q267F F283S Q288R) | | |
| t879191 | Library | 1051 | 1152 |
| | (CsPT1-CsPT4 chimera; Q35A M43L V75I I86A M87I | | |
| | D94E L105I E113R L118I F139L V140L I142L I147L | | |
| | F151A T213V V234M M243I F245R L256V V257G | | |
| | S258A I264F Q267F Q288R L311N) | | |
| t879379 | Library | 1052 | 1153 |
| | (CsPT1-CsPT4 chimera; C31F L34F Q35S V39T M43L | | |
| | A47S F72V A85N I86V M87V D94E V129L F141S | | |
| | F145L I147L A152V T171I S182V M207V G211S | | |
| | T213V A227K F245R V250L L311N) | | |
| t879066 | Library | 1053 | 1154 |
| | (CsPT1-CsPT4 chimera; T30A C31F M43L I86A D94E | | |
| | M110I E113R L118I I121S V129I I147L F151A M212I | | |
| | T213G I223V V234L A240V R241K N242T F245R | | |
| | V246L S258A Q267F L281A Q288R) | | |
| t879874 | Library | 1054 | 1155 |
| | (CsPT1-CsPT4 chimera; T30A C31F V39T M43L | | |
| | S79C I86V M87V D94E V106A F141S F145L I147L | | |
| | A149L T171I S174V M210F M212L T213V F245R | | |
| | V246L V247C V250L V257G S258A L311N) | | |
| t879638 | Library | 1055 | 1156 |
| | (CsPT1-CsPT4 chimera; C31F M43V S45L G49I F72V | | |
| | F82A M87V D94E V106A E113R V129L F141V | | |
| | I142L F145L G211S A227K V234L R241K F245W | | |
| | L256V S258A Q267F A279I C284W Q288R) | | |
| t879848 | Library | 1056 | 1157 |
| | (CsPT1-CsPT4 chimera; C31F M43L S45F V75I I86V | | |
| | M87V D94E L105I V106A F139L V140T F141V | | |
| | F145L I147L A152I T171I G177L A179P M207V | | |
| | A227R V234L F245R V247G S258A L311N) | | |
| t879358 | Library | 1057 | 1158 |
| | (CsPT1-CsPT4 chimera; C31F M43V M87V D94E | | |
| | M110L E113R F139L V140T F141S F145L L169I | | |
| | I172L G177L A227K V234F F245W V246I V247C | | |
| | V250L L252I L256V V257G S258A Q267F Q288R) | | |
| t879809 | Library | 1058 | 1159 |
| | (CsPT4-CsPT7 chimera; T30A C31F M43L I86A M87I | | |
| | D94E E113R V129L I142L I147L A152F T171I G177L | | |
| | M210F G211S T213V A227K V234L R241K F245R | | |
| | V246I S258A Q267F C284W Q288R) | | |
| t879226 | Library | 1059 | 1160 |
| | (CsPT4-CsPT7 chimera; T30A C31F V40I M43L S45L | | |
| | I46G G49S I86A D94E V106A M110L E113R V129I | | |
| | I147L A149L T171I G211S M212L T213V A227R | | |
| | V234L F245R V250L Q267F Q288R) | | |
| t879141 | Library | 1060 | 1161 |
| | (CsPT4-CsPT7 chimera; T30A M43L S79L A85N I86A | | |
| | D94E E113R V129I F139L I147L A149L T171I S182V | | |
| | G211S Y229F A240V R241K M243T F245R V247C | | |
| | V250L Q267F C284I Q288R L311N) | | |
| t879439 | Library | 1061 | 1162 |
| | (CsPT4-CsPT7 chimera; C31F L34F M43L I86A D94E | | |
| | V106A E113R L118I F141C I147L A149L F151A | | |
| | S174V S182V M207V G211S A227K R241K F245R | | |
| | V246A L256V S258A Q267F C284V Q288R) | | |
| t879243 | Library | 1062 | 1163 |
| | (CsPT4-CsPT7 chimera; V40I M43L S45L I86A M87I | | |
| | D94E V106A E113R I147L A149L F151T NI67A | | |
| | T171I S173T T213V A227K R241K M243T F245R | | |
| | V246L V247C L256V Q267F Q288R L311N) | | |
| t879134 | Library | 1063 | 1164 |
| | (CsPT4-CsPT7 chimera; M43L F82G D94E E113R | | |
| | F139I F141S I142L I147L A149L A179N S182V | | |
| | M212I I223V V231I V234L A240V R241K F245R | | |
| | V247C S258A Q267F S271G F283S Q288R L311K) | | |
| t879557 | Library | 1064 | 1165 |
| | (CsPT4-CsPT7 chimera; C31F V39T M43V S45I S63N | | |
| | M87V D94E E113R F139L V140T F141V F145L | | |
| | A152I S182V R197S I204T A227K R241K F245W | | |
| | V246A L256V V257G S258A Q267F Q288R) | | |
| t879202 | Library | 1065 | 1166 |
| | (CsPT4-CsPT7 chimera; M43L S45L I86A M87I D94E | | |
| | E113R V129L I142L I147L A149L T171I I172V G177I | | |
| | A179N S182V 1204T M210F T213V V234L R241K | | |
| | F245R V250L Q267F Q288R L311N) | | |
| t879067 | Library | 1066 | 1167 |
| | (CsPT4-CsPT7 chimera; T30A C31F M43L I46G I86V | | |
| | M87V D94E M110I V129L F139L F145L I147L | | |
| | A149L T171I G177L A179N A227K Y229F R241K | | |
| | F245R V246L V247C V250L I264F L311N) | | |
| t879099 | Library | 1067 | 1168 |
| | (CsPT4-CsPT7 chimera; M43L S45L I46A P76A I86A | | |
| | M87I D94E V106A E113R F141C I147L F151T A152I | | |
| | M207V M212L A227R V234L T236A M243I F245R | | |
| | V247C S258A Q267F Q288R L311N) | | |
| t879286 | Library | 1068 | 1169 |
| | (CsPT4-CsPT7 chimera; L34F V39T M43L S45L F82G | | |
| | I86G M87I D94E V106A E113R V140F I147L T171I | | |
| | G211S T213A F216I V234L M243A F245R V246L | | |
| | V247C Q267F C284W Q288R L311K) | | |
| t878988 | Library | 1069 | 1170 |
| | (CsPT4-CsPT7 chimera; T30A M43L S63N I86A M87I | | |
| | D94E V106A E113R I147L F151T N167A A179N | | |
| | S182V M212I A217T V234L R241K M243T F245R | | |
| | V246F V247C Q267F C284W Q288R L311N) | | |
| t879148 | Library | 1070 | 1171 |
| | (CsPT4-CsPT7 chimera; M43L I46G I86A M87I D94E | | |
| | V106A M110I E113R L124V F139L I147L F151A | | |
| | T171I G211S A227K F245R V247C V250L L256V | | |
| | S258A Q267F C284V Q288R T289A L311N) | | |
| t879235 | Library | 1071 | 1172 |
| | (CsPT4-CsPT7 chimera; T30A M43L I46G G49S I86A | | |
| | M87I D94E M110L E113R F139L F141G I147L T171I | | |
| | I172V S173T T213A A227K V231I M243A F245R | | |
| | V247C V250L Q267F Q288R L311N) | | |
| t879422 | Library | 1072 | 1173 |
| | (CsPT4-CsPT7 chimera; C31F M43V A47S A73G | | |
| | S79C M87V D94E E113R V129I F141S F145L A149L | | |
| | A152L T171I A179N S182V M210F M212L V234L | | |
| | R241K F245W V247C S258A Q267F Q288R) | | |
| t879687 | Library | 1073 | 1174 |
| | (CsPT4-CsPT7 chimera; T30A C31F M43L G49S I86A | | |
| | D94E E113R L118I I121S V129L F139I I142L I147L | | |
| | G177I G211S A227K Y229F V234L R241K F245R | | |
| | V246I V247C V250L Q267F Q288R) | | |
| t879050 | Library | 1074 | 1175 |
| | (CsPT4-CsPT7 chimera; T30A M43L S45L S79L F82G | | |
| | D94E E113R V129I F141S I142L I147L G177I A179N | | |
| | S182V M212I V234F R241K F245R V247C V250L | | |
| | S258A Q267F C284W Q288R L311K) | | |
| t879913 | Library | 1075 | 1176 |
| | (CsPT4-CsPT7 chimera; T30A M43L F82G D94E | | |
| | E113R V129I V140T F141C I142L I147L A179N | | |
| | S182V I204T A227R V234M M243T F245R V246I | | |
| | V247C V250L S258A Q267F C284W Q288R L311K) | | |
| t879059 | Library | 1076 | 1177 |
| | (CsPT4-CsPT7 chimera; M43L F72Q F82G M87I | | |
| | D94E E113R I147L A149L N167A T171I S173L | | |
| | S182V F200L M212I V231I V234F M243T F245R | | |
| | V246I V247C V250L S258A Q267F Q288R L311K) | | |
| t879037 | Library | 1077 | 1178 |
| | (CsPT4-CsPT7 chimera; T30A V40I M43L F82G M87I | | |
| | D94E E113R I147L T171I S173L G177T V209L | | |
| | M212L Y229F V234L R241K F245R V246I V247C | | |
| | V250I S258A Q267F C284W Q288R L311K) | | |
| t879885 | Library | 1078 | 1179 |
| | (CsPT4-CsPT7 chimera; T30A M43L S45L I86A D94E | | |
| | E113R V129L F141A I142L I147L A149L F151A | | |
| | N167A T171I A179N M210F T213V V231I R241K | | |
| | F245R V247C V250L Q267F Q288R L311N) | | |
| t879332 | Library | 1079 | 1180 |
| | (CsPT4-CsPT7 chimera; T30A C31F V39T V40I M43L | | |
| | A85N I86V M87V D94E V129L V140T F145L I147L | | |
| | S182V M207V G211S T213V A227R V234L F245R | | |
| | V246L V247C V257G S258A L311N) | | |
| t879116 | Library | 1080 | 1181 |
| | (CsPT4-CsPT7 chimera; T30A M43L S45L G49S S79L | | |
| | I86A D94E E113R I142L I147L A149L N167A T171I | | |
| | G211S T213V I220L V234L F245R V246I V247C | | |
| | V250L L256V Q267F Q288R L311N) | | |
| t879830 | Library | 1081 | 1182 |
| | (CsPT4-CsPT7 chimera; C31F M43V I46G M87V | | |
| | D94E V106A E113R F139L F141V I142L F145L | | |
| | I172L S173L S182V M212L T213V I220L V234L | | |
| | N242T F245W V247C V257G Q267F S271L Q288R) | | |

### EQUIVALENTS

[0622] Those skilled in the art will recognize, or be able to ascertain using no more than routine experimentation, many equivalents to the specific embodiments of the invention described here. Such equivalents are intended to be encompassed by the following claims.

[0623] All references, including patent documents, are incorporated by reference in their entirety.

The application's sequence listing, which the Patent Office published only in electronic form, follows.

SEQUENCE LISTING (1185 sequences)

SEQ ID NO: 1 - protein, 307 aa, Unknown [sequence omitted]

SEQ ID NO: 2 - DNA, 924 bp, Unknown
  Streptomyces sp
atgtcagaagccgcagatgtcgaaagagtttacgccgctatggaagaagccgccggtttgttaggtgttgcctgtgccagagataagatctacccattgttgtctacttttcaagatacattagttgaaggtggttcagttgttgttttctctatggcttcaggtagacattctacagaattggatttctctatctcagttccaacatcacatggtgatccatacgctactgttgttgaaaaaggtttatttccagcaacaggtcatccagttgatgatttgttggctgatactcaaaagcatttgccagtttctatgtttgcaattgatggtgaagttactggtggtttcaagaaaacttacgctttctttccaactgataacatgccaggtgttgcagaattatctgctattccatcaatgccaccagctgttgcagaaaatgcagaattatttgctagatacggtttggataaggttcaaatgacatctatggattacaagaaaagacaagttaatttgtacttttctgaattatcagcacaaactttggaagctgaatcagttttggcattagttagagaattgggtttacatgttccaaacgaattgggtttgaagttttgtaaaagatctttctcagtttatccaactttaaactgggaaacaggcaagatcgatagattatgtttcgcagttatctctaacgatccaacattggttccatcttcagatgaaggtgatatcgaaaagtttcataactacgctactaaagcaccatatgcttacgttggtgaaaagagaacattagtttatggtttgactttatcaccaaaggaagaatactacaagttgggtgcttactaccacattaccgacgtacaaagaggtttattgaaagcattcgatagtttagaagactaa

SEQ ID NO: 3 - protein, 395 aa, Cannabis sativa
MGLSSVCTFSFQTNYHTLLNPHNNNPKTSLLCYRHPKTPIKYSYNNFPSKHCSTKSFHLQNKCSESLSIAKNSIRAATTNQTEPPESDNHSVATKILNFGKACWKLQRPYTIIAFTSCACGLFGKELLHNTNLISWSLMFKAFFFLVAILCIASFTTTINQIYDLHIDRINKPDLPLASGEISVNTAWIMSIIVALFGLIITIKMKGGPLYIFGYCFGIFGGIVYSVPPFRWKQNPSTAFLLNFLAHIITNFTFYYASRAALGLPFELRPSFTFLLAFMKSMGSALALIKDASDVEGDTKFGISTLASKYGSRNLTLFCSGIVLLSYVAAILAGIIWPQAFNSNVMLLSHAILAFWLILQTRDFALTNYDPEAGRRFYEFMWKLYYAEYLVYVFI

SEQ ID NO: 4 - protein, 398 aa, Cannabis sativa
MGLSLVCTFSFQTNYHTLLNPHNKNPKNSLLSYQHPKTPIIKSSYDNFPSKYCLTKNFHLLGLNSHNRISSQSRSIRAGSDQIEGSPHHESDNSIATKILNFGHTCWKLQRPYVVKGMISIACGLFGRELFNNRHLFSWGLMWKAFFALVPILSFNFFAAIMNQIYDVDIDRINKPDLPLVSGEMSIETAWILSIIVALTGLIVTIKLKSAPLFVFIYIFGIFAGFAYSVPPIRWKQYPFTNFLITISSHVGLAFTSYSATTSALGLPFVWRPAFSFIIAFMTVMGMTIAFAKDISDIEGDAKYGVSTVATKLGARNMTFVVSGVLLLNYLVSISIGIIWPQVFKSNIMILSHAILAFCLIFQTRELALANYASAPSRQFFEFIWLLYYAEYFVYVFI

SEQ ID NO: 5 - protein, 323 aa, Artificial Sequence
  Synthetic
MSAGSDQIEGSPHHESDNSIATKILNFGHTCWKLQRPYVVKGMISIACGLFGRELFNNRHLFSWGLMWKAFFALVPILSFNFFAAIMNQIYDVDIDRINKPDLPLVSGEMSIETAWILSIIVALTGLIVTIKLKSAPLFVFIYIFGIFAGFAYSVPPIRWKQYPFTNFLITISSHVGLAFTSYSATTSALGLPFVWRPAFSFIIAFMTVMGMTIAFAKDISDIEGDAKYGVSTVATKLGARNMTFVVSGVLLLNYLVSISIGIIWPQVFKSNIMILSHAILAFCLIFQTRELALANYASAPSRQFFEFIWLLYYAEYFVYVFI

SEQ ID NO: 6 - protein, 322 aa, Artificial Sequence
  Synthetic
SAGSDQIEGSPHHESDNSIATKILNFGHTCWKLQRPYVVKGMISIACGLFGRELFNNRHLFSWGLMWKAFFALVPILSFNFFAAIMNQIYDVDIDRINKPDLPLVSGEMSIETAWILSIIVALTGLIVTIKLKSAPLFVFIYIFGIFAGFAYSVPPIRWKQYPFTNFLITISSHVGLAFTSYSATTSALGLPFVWRPAFSFIIAFMTVMGMTIAFAKDISDIEGDAKYGVSTVATKLGARNMTFVVSGVLLLNYLVSISIGIIWPQVFKSNIMILSHAILAFCLIFQTRELALANYASAPSRQFFEFIWLLYYAEYFVYVFI

SEQ ID NO: 7 - protein, 316 aa, Cannabis sativa
IEGSPHHESDNSIATKILNFGHTCWKLQRPYVVKGMISIACGLFGRELFNNRHLFSWGLMWKAFFALVPILSFNFFAAIMNQIYDVDIDRINKPDLPLVSGEMSIETAWILSIIVALTGLIVTIKLKSAPLFVFIYIFGIFAGFAYSVPPIRWKQYPFTNFLITISSHVGLAFTSYSATTSALGLPFVWRPAFSFIIAFMTVMGMTIAFAKDISDIEGDAKYGVSTVATKLGARNMTFVVSGVLLLNYLVSISIGIIWPQVFKSNIMILSHAILAFCLIFQTRELALANYASAPSRQFFEFIWLLYYAEYFVYVFI

SEQ ID NO: 8 - protein, 311 aa, Cannabis sativa
HHESDNSIATKILNFGHTCWKLQRPYVVKGMISIACGLFGRELFNNRHLFSWGLMWKAFFALVPILSFNFFAAIMNQIYDVDIDRINKPDLPLVSGEMSIETAWILSIIVALTGLIVTIKLKSAPLFVFIYIFGIFAGFAYSVPPIRWKQYPFTNFLITISSHVGLAFTSYSATTSALGLPFVWRPAFSFIIAFMTVMGMTIAFAKDISDIEGDAKYGVSTVATKLGARNMTFVVSGVLLLNYLVSISIGIIWPQVFKSNIMILSHAILAFCLIFQTRELALANYASAPSRQFFEFIWLLYYAEYFVYVFI

SEQ ID NO: 9 - protein, 397 aa, Cannabis sativa
SSDLPSVLSKGGSNWRRCNLKNVEFSGSYVAYNVSRLRVWKVREKPCSAVFQPSSLKHCAKGSETFVFYQRPNERFLVKAAGGQPLESEPKNDMNSAKDALDAFYRFSRPHTVIGTALSIVSVSLLAIEKLSDFSPLFFVGMLEAIVAALLMNIYIVGLNQLYDIDIDKVNKPYLPLASGEYSIQTGVMIVASFSILSFGVGWLVGSWPLFWALFISFVLGTAYSINVPLLRWKRFALVAAMCILAVRAVIVQLAFFLHIQTHVFKRPAVFSRPLIFATAFMSFFSVVIALFKDIPDIDGDRIYGIRSFTVRLGQKRVFWICISLLEIAYTVALLVGASSGFLWSKVVTVLGHTILASILWTNAKSVDLSSKAAITSFYMFIWKLFYAEYLLIPLVR

SEQ ID NO: 10 - protein, 397 aa, Cannabis sativa
MELSSICNFSFQTNYHTLLNPHNKNPKSSLLSHQHPKTPIITSSYNNFPSNYCSNKNFHLQNRCSKSLLIAKNSIRTDTANQTEPPESNTKYSVVTKILSFGHTCWKLQRPYTFIGVISCACGLFGRELFHNTNLLSWSLMLKAFSSLMVILSVNLCTNIINQITDLDIDRINKPDLPLASGEMSIETAWIMSIIVALTGLILTIKLNCGPLFISLYCVSILVGALYSVPPFRWKQNPNTAFSSYFMGLVIVNFTCYYASRAAFGLPFEMSPPFTFILAFVKSMGSALFLCKDVSDIEGDSKHGISTLATRYGAKNITFLCSGIVLLTYVSAILAAIIWPQAFKSNVMLLSHATLAFWLIFQTREFALTNYNPEAGRKFYEFMWKLHYAEYLVYVFI

SEQ ID NO: 11 - protein, 7 aa, Artificial Sequence
  Synthetic
MTVMGMT

SEQ ID NO: 12 - protein, 12 aa, Artificial Sequence
  Synthetic
  misc_feature (1)..(1): Xaa may be E or V
  misc_feature (2)..(2): Xaa may be L, M or W
  misc_feature (3)..(3): Xaa may be R or S
  misc_feature (5)..(5): Xaa may be S, A or P
  misc_feature (7)..(7): Xaa may be S or T
  misc_feature (9)..(10): Xaa may be I or L
XXXPXFXFXXAF

SEQ ID NO: 13 - protein, 7 aa, Artificial Sequence
  Synthetic
QFFEFIW

SEQ ID NO: 14 - protein, 5 aa, Artificial Sequence
  Synthetic
HNTNL

SEQ ID NO: 15 - protein, 5 aa, Artificial Sequence
  Synthetic
TCWKL

SEQ ID NO: 16 - protein, 11 aa, Artificial Sequence
  Synthetic
  misc_feature (2)..(2): Xaa may be I or L
MXLSHAILAFC

SEQ ID NO: 17 - protein, 16 aa, Artificial Sequence
  Synthetic
  misc_feature (4)..(4): Xaa may be L or V
  misc_feature (5)..(5): Xaa may be A or N
  misc_feature (8)..(8): Xaa may be S, C or F
  misc_feature (10)..(10): Xaa may be Y or S
  misc_feature (12)..(12): Xaa may be S or T
  misc_feature (13)..(13): Xaa may be R or T
  misc_feature (14)..(14): Xaa may be A or S
  misc_feature (16)..(16): Xaa may be L or F
HVGXXFTXYXAXXXAX

SEQ ID NO: 18 - protein, 5 aa, Artificial Sequence
  Synthetic
GLIVT

SEQ ID NO: 19 - protein, 8 aa, Artificial Sequence
  Synthetic
  misc_feature (2)..(2): Xaa may be Y or H
  misc_feature (7)..(7): Xaa may be L or F
LXYAEYXV

SEQ ID NO: 20 - protein, 6 aa, Artificial Sequence
  Synthetic
KAFFAL

SEQ ID NO: 21 - protein, 8 aa, Artificial Sequence
  Synthetic
KLGARNMT

SEQ ID NO: 22 - protein, 6 aa, Artificial Sequence
  Synthetic
  misc_feature (4)..(4): Xaa may be N or K
QAFXSN

SEQ ID NO: 23 - protein, 5 aa, Artificial Sequence
  Synthetic
LIFQT

SEQ ID NO: 24 - protein, 7 aa, Artificial Sequence
  Synthetic
SIIVALT

SEQ ID NO: 25 - protein, 7 aa, Artificial Sequence
  Synthetic
MSIETAW

SEQ ID NO: 26 - protein, 5 aa, Artificial Sequence
  Synthetic
VVSGV

SEQ ID NO: 27 - protein, 5 aa, Artificial Sequence
  Synthetic
RPYVV

SEQ ID NO: 28 - protein, 5 aa, Artificial Sequence
  Synthetic
KPDLP

SEQ ID NO: 29 - protein, 5 aa, Artificial Sequence
  Synthetic
RWKQY

SEQ ID NO: 30 - protein, 5 aa, Artificial Sequence
  Synthetic
FLITI

SEQ ID NO: 31 - protein, 5 aa, Artificial Sequence
  Synthetic
DIEGD

SEQ ID NO: 32 - protein, 6 aa, Artificial Sequence
  Synthetic
KYGVST

SEQ ID NO: 33 - protein, 53 aa, Artificial Sequence
  Synthetic
MSAGSDQIEGSPHHESDNSIATKILNFGHTCWKLQRPYVVKGMISIACGLFGR

SEQ ID NO: 34 - protein, 50 aa, Artificial Sequence
  Synthetic
MSAGSDQIEGSPHHESDNSIATKILNFGHTCWKLQRPYVVKGMISIACGL

SEQ ID NO: 35 - protein, 52 aa, Artificial Sequence
  Synthetic
MSAGSDQIEGSPHHESDNSIATKILNFGHTCWKLQRPYVVKGMISIACGLFG

SEQ ID NO: 36 - protein, 53 aa, Artificial Sequence; identical to SEQ ID NO: 33
  Synthetic

SEQ ID NO: 37 - protein, 50 aa, Artificial Sequence; identical to SEQ ID NO: 34
  Synthetic

SEQ ID NO: 38 - protein, 49 aa, Artificial Sequence
  Synthetic
MSAGSDQIEGSPHHESDNSIATKILNFGHTCWKLQRPYVVKGMISIACG

SEQ ID NO: 39 - protein, 54 aa, Artificial Sequence
  Synthetic
MSAGSDQIEGSPHHESDNSIATKILNFGHTCWKLQRPYVVKGMISIACGLFGRE

SEQ ID NO: 40 - protein, 15 aa, Artificial Sequence
  Synthetic
ELLHNTNLISWSLMF

SEQ ID NO: 41 - protein, 27 aa, Artificial Sequence
  Synthetic
FGRELFHNTNLLSWSLMLKAFSSLMVI

SEQ ID NO: 42 - protein, 17 aa, Artificial Sequence
  Synthetic
KELLHNTNLISWSLMFK

SEQ ID NO: 43 - protein, 15 aa, Artificial Sequence
  Synthetic
ELFHNTNLLSWSLML

SEQ ID NO: 44 - protein, 27 aa, Artificial Sequence
  Synthetic
FGKELLHNTNLISWSLMFKAFFFLVAI

SEQ ID NO: 45 - protein, 29 aa, Artificial Sequence
  Synthetic
LFGKELLHNTNLISWSLMFKAFFFLVAIL

SEQ ID NO: 46 - protein, 13 aa, Artificial Sequence
  Synthetic
KLSDFSPLFFVGM

SEQ ID NO: 47 - protein, 62 aa, Artificial Sequence
  Synthetic
KAFFALVPILSFNFFAAIMNQIYDVDIDRINKPDLPLVSGEMSIETAWILSIIVALTGLIVT

SEQ ID NO: 48 - protein, 46 aa, Artificial Sequence
  Synthetic
LSFNFFAAIMNQIYDVDIDRINKPDLPLVSGEMSIETAWILSIIVA

SEQ ID NO: 49 - protein, 60 aa, Artificial Sequence
  Synthetic
AFFALVPILSFNFFAAIMNQIYDVDIDRINKPDLPLVSGEMSIETAWILSIIVALTGLIV

SEQ ID NO: 50 - protein, 62 aa, Artificial Sequence; identical to SEQ ID NO: 47
  Synthetic

SEQ ID NO: 51 - protein, 46 aa, Artificial Sequence; identical to SEQ ID NO: 48
  Synthetic

SEQ ID NO: 52 - protein, 44 aa, Artificial Sequence
  Synthetic
SFNFFAAIMNQIYDVDIDRINKPDLPLVSGEMSIETAWILSIIV

SEQ ID NO: 53 - protein, 64 aa, Artificial Sequence
  Synthetic
WKAFFALVPILSFNFFAAIMNQIYDVDIDRINKPDLPLVSGEMSIETAWILSIIVALTGLIVTI

SEQ ID NO: 54 - protein, 7 aa, Artificial Sequence
  Synthetic
IKMKGGP

SEQ ID NO: 55 - protein, 23 aa, Artificial Sequence
  Synthetic
LTGLILTIKLNCGPLFISLYCVS

SEQ ID NO: 56 - protein, 9 aa, Artificial Sequence
  Synthetic
TIKMKGGPL

SEQ ID NO: 57 - protein, 7 aa, Artificial Sequence
  Synthetic
IKLNCGP

SEQ ID NO: 58 - protein, 23 aa, Artificial Sequence
  Synthetic
LFGLIITIKMKGGPLYIFGYCFG

SEQ ID NO: 59 - protein, 25 aa, Artificial Sequence
  Synthetic
ALFGLIITIKMKGGPLYIFGYCFGI

SEQ ID NO: 60 - protein, 5 aa, Artificial Sequence
  Synthetic
LVGSW

SEQ ID NO: 61 - protein, 46 aa, Artificial Sequence
  Synthetic
LFVFIYIFGIFAGFAYSVPPIRWKQYPFTNFLITISSHVGLAFTSY

SEQ ID NO: 62 - protein, 31 aa, Artificial Sequence
  Synthetic
IFAGFAYSVPPIRWKQYPFTNFLITISSHVG

SEQ ID NO: 63 - protein, 44 aa, Artificial Sequence
  Synthetic
FVFIYIFGIFAGFAYSVPPIRWKQYPFTNFLITISSHVGLAFTS

SEQ ID NO: 64 - protein, 46 aa, Artificial Sequence; identical to SEQ ID NO: 61
  Synthetic

SEQ ID NO: 65 - protein, 31 aa, Artificial Sequence; identical to SEQ ID NO: 62
  Synthetic

SEQ ID NO: 66 - protein, 29 aa, Artificial Sequence
  Synthetic
FAGFAYSVPPIRWKQYPFTNFLITISSHV

SEQ ID NO: 67 - protein, 48 aa, Artificial Sequence
  Synthetic
PLFVFIYIFGIFAGFAYSVPPIRWKQYPFTNFLITISSHVGLAFTSYS

SEQ ID NO: 68 - protein, 16 aa, Artificial Sequence
  Synthetic
YASRAALGLPFELRPS

SEQ ID NO: 69 - protein, 29 aa, Artificial Sequence
  Synthetic
VNFTCYYASRAAFGLPFEMSPPFTFILAF

SEQ ID NO: 70 - protein, 18 aa, Artificial Sequence
  Synthetic
YYASRAALGLPFELRPSF

SEQ ID NO: 71 - protein, 16 aa, Artificial Sequence
  Synthetic
YASRAAFGLPFEMSPP

SEQ ID NO: 72 - protein, 29 aa, Artificial Sequence
  Synthetic
TNFTFYYASRAALGLPFELRPSFTFLLAF

SEQ ID NO: 73 - protein, 31 aa, Artificial Sequence
  Synthetic
ITNFTFYYASRAALGLPFELRPSFTFLLAFM

SEQ ID NO: 74 - protein, 15 aa, Artificial Sequence
  Synthetic
HIQTHVFKRPAVFSR

SEQ ID NO: 75 - protein, 61 aa, Artificial Sequence
  Synthetic
FSFIIAFMTVMGMTIAFAKDISDIEGDAKYGVSTVATKLGARNMTFVVSGVLLLNYLVSIS

SEQ ID NO: 76 - protein, 47 aa, Artificial Sequence
  Synthetic
MTVMGMTIAFAKDISDIEGDAKYGVSTVATKLGARNMTFVVSGVLLL

SEQ ID NO: 77 - protein, 59 aa, Artificial Sequence
  Synthetic
SFIIAFMTVMGMTIAFAKDISDIEGDAKYGVSTVATKLGARNMTFVVSGVLLLNYLVSI

SEQ ID NO: 78 - protein, 61 aa, Artificial Sequence; identical to SEQ ID NO: 75
  Synthetic

SEQ ID NO: 79 - protein, 47 aa, Artificial Sequence; identical to SEQ ID NO: 76
  Synthetic

SEQ ID NO: 80 - protein, 45 aa, Artificial Sequence
  Synthetic
TVMGMTIAFAKDISDIEGDAKYGVSTVATKLGARNMTFVVSGVLL

SEQ ID NO: 81 - protein, 63 aa, Artificial Sequence
  Synthetic
AFSFIIAFMTVMGMTIAFAKDISDIEGDAKYGVSTVATKLGARNMTFVVSGVLLLNYLVSISI

SEQ ID NO: 82 - protein, 12 aa, Artificial Sequence
  Synthetic
AGIIWPQAFNSN

SEQ ID NO: 83 - protein, 25 aa, Artificial Sequence
  Synthetic
TYVSAILAAIIWPQAFKSNVMLLSH

SEQ ID NO: 84 - protein, 14 aa, Artificial Sequence
  Synthetic
LAGIIWPQAFNSNV

SEQ ID NO: 85 - protein, 12 aa, Artificial Sequence
  Synthetic
AAIIWPQAFKSN

SEQ ID NO: 86 - protein, 25 aa, Artificial Sequence
  Synthetic
SYVAAILAGIIWPQAFNSNVMLLSH

SEQ ID NO: 87 - protein, 27 aa, Artificial Sequence
  Synthetic
LSYVAAILAGIIWPQAFNSNVMLLSHA

SEQ ID NO: 88 - protein, 10 aa, Artificial Sequence
  Synthetic
GASSGFLWSK

SEQ ID NO: 89 - protein, 45 aa, Artificial Sequence
  Synthetic
IMILSHAILAFCLIFQTRELALANYASAPSRQFFEFIWLLYYAEY

SEQ ID NO: 90 - protein, 32 aa, Artificial Sequence
  Synthetic
AILAFCLIFQTRELALANYASAPSRQFFEFIW

SEQ ID NO: 91 - protein, 43 aa, Artificial Sequence
  Synthetic
MILSHAILAFCLIFQTRELALANYASAPSRQFFEFIWLLYYAE

SEQ ID NO: 92 - protein, 45 aa, Artificial Sequence; identical to SEQ ID NO: 89
  Synthetic

SEQ ID NO: 93 - protein, 32 aa, Artificial Sequence; identical to SEQ ID NO: 90
  Synthetic

SEQ ID NO: 94 - protein, 30 aa, Artificial Sequence
  Synthetic
ILAFCLIFQTRELALANYASAPSRQFFEFI

SEQ ID NO: 95 - protein, 47 aa, Artificial Sequence
  Synthetic
NIMILSHAILAFCLIFQTRELALANYASAPSRQFFEFIWLLYYAEYF

SEQ ID NO: 96 - protein, 6 aa, Artificial Sequence
  Synthetic
LVYVFI

SEQ ID NO: 97 - protein, 13 aa, Artificial Sequence
  Synthetic
KLHYAEYLVYVFI

SEQ ID NO: 98 - protein, 7 aa, Artificial Sequence
  Synthetic
YLVYVFI

SEQ ID NO: 99 - protein, 6 aa, Artificial Sequence
  Synthetic
LVYVFI

SEQ ID NO: 100 - protein, 13 aa, Artificial Sequence
  Synthetic
KLYYAEYLVYVFI

SEQ ID NO: 101 - protein, 14 aa, Artificial Sequence
  Synthetic
WKLYYAEYLVYVFI

SEQ ID NO: 102 - protein, 6 aa, Artificial Sequence
  Synthetic
LIPLVR

SEQ ID NO: 103 - protein, 352 aa, Artificial Sequence
  Synthetic
MASEKEIRRERFLNVFPKLVEELNASLLAYGMPKEACDWYAHSLNYNTPGGKLNRGLSVVDTYAILSNKTVEQLGQEEYEKVAILGWCIELLQAYWLVADDMMDKSITRRGQPCWYKVPEVGEIAIWDAFMLEAAIYKLLKSHFRNEKYYIDITELFHEVTFQTELGQLMDLITAPEDKVDLSKFSLKKHSFIVTFKTAYYSFYLPVALAMYVAGITDEKDLKQARDVLIPLGEYFQIQDDYLDCFGTPEQIGKIGTDIQDNKCSWVINKALELASAEQRKTLDENYGKKDSVAEAKCKKIFNDLKIEQLYHEYEESIAKDLKAKISQVDESRGFKADVLTAFLNKVYKRSK

SEQ ID NO: 104 - protein, 4 aa, Artificial Sequence
  Synthetic
GGGS

SEQ ID NO: 105 - protein, 9 aa, Artificial Sequence
  Synthetic
SGSGSGSGS

SEQ ID NO: 106 - protein, 14 aa, Artificial Sequence
  Synthetic
GGGSGGGGSGGGGS

SEQ ID NO: 107 - protein, 24 aa, Artificial Sequence
  Synthetic
GGGSGGGGSGGGGSGGGGSGGGGS

SEQ ID NO: 108 - protein, 34 aa, Artificial Sequence
  Synthetic
GGGSGGGGSGGGGSGGGGSGGGGSGGGGSGGGGS

SEQ ID NO: 109 - protein, 44 aa, Artificial Sequence
  Synthetic
GGGSGGGGSGGGGSGGGGSGGGGSGGGGSGGGGSGGGGSGGGGS

SEQ ID NO: 110 - protein, 323 aa, Artificial Sequence
  Synthetic
MSAGSDQIEGSPHHESDNSIATKILNFGHTCWKLQRPYVVKGMISIACGLFGRELFHNTNLLSWSLMLKAFSSLMVILSFNFFAAIMNQIYDVDIDRINKPDLPLVSGEMSIETAWILSIIVALTGLILTIKLNCGPLFISLYCVGIFAGFAYSVPPIRWKQYPFTNFLITISSHVGLNFTCYYASRAAFGLPFEMSPPFTFILAFMTVMGMTIAFAKDISDIEGDAKYGVSTVATKLGARNMTFVVSGVLLLNYVSAILAAIIWPQAFKSNVMLLSHAILAFCLIFQTRELALANYASAPSRQFFEFIWLLHYAEYLVYVFI

SEQ ID NO: 111 - protein, 323 aa, Artificial Sequence
  Synthetic
MSAGSDQIEGSPHHESDNSIATKILNFGHTCWKLQRPYVVKGMISIACGLFGRELFHNTNLLSWSLMLKAFFALVPILSFNFFAAIMNQIYDVDIDRINKPDLPLVSGEMSIETAWILSIIVALTGLIVTIKLNCGPLFVFIYIFGIFAGFAYSVPPIRWKQYPFTNFLITISSHVGLAFTSYYASRAAFGLPFEMSPPFSFIIAFMTVMGMTIAFAKDISDIEGDAKYGVSTVATKLGARNMTFVVSGVLLLNYLVSILAAIIWPQAFKSNVMILSHAILAFCLIFQTRELALANYASAPSRQFFEFIWLLYYAEYLVYVFI

SEQ ID NO: 112 - protein, 325 aa, Artificial Sequence
  Synthetic
MSAGSDQIEGSPHHESDNSIATKILNFGHTCWKLQRPYVVKGMISIACGLFGREKLSDFSPLFFVGMWKAFFALVPILSFNFFAAIMNQIYDVDIDRINKPDLPLVSGEMSIETAWILSIIVALTGLIVTILVGSWPLFVFIYIFGIFAGFAYSVPPIRWKQYPFTNFLITISSHVGLAFTSYSHIQTHVFKRPAVFSRAFSFIIAFMTVMGMTIAFAKDISDIEGDAKYGVSTVATKLGARNMTFVVSGVLLLNYLVSISIGASSGFLWSKNIMILSHAILAFCLIFQTRELALANYASAPSRQFFEFIWLLYYAEYFLIPLVR

SEQ ID NO: 113 - protein, 323 aa, Artificial Sequence
  Synthetic
MSAGSDQIEGSPHHESDNSIATKILNFGHTCWKLQRPYVVKGMISIACGLFGKELLHNTNLISWSLMFKAFFFLVAILSFNFFAAIMNQIYDVDIDRINKPDLPLVSGEMSIETAWILSIIVALFGLIITIKMKGGPLYIFGYCFGIFAGFAYSVPPIRWKQYPFTNFLITISSHVGTNFTFYYASRAALGLPFELRPSFTFLLAFMTVMGMTIAFAKDISDIEGDAKYGVSTVATKLGARNMTFVVSGVLLLSYVAAILAGIIWPQAFNSNVMLLSHAILAFCLIFQTRELALANYASAPSRQFFEFIWKLYYAEYLVYVFI

SEQ ID NO: 114 - protein, 323 aa, Artificial Sequence
  Synthetic
MSAGSDQIEGSPHHESDNSIATKILNFGHTCWKLQRPYVVKGMISIACGLFGKELLHNTNLISWSLMFKAFFALVPILSFNFFAAIMNQIYDVDIDRINKPDLPLVSGEMSIETAWILSIIVALTGLIVTIKMKGGPLFVFIYIFGIFAGFAYSVPPIRWKQYPFTNFLITISSHVGLAFTSYYASRAALGLPFELRPSFSFIIAFMTVMGMTIAFAKDISDIEGDAKYGVSTVATKLGARNMTFVVSGVLLLNYLVSILAGIIWPQAFNSNVMILSHAILAFCLIFQTRELALANYASAPSRQFFEFIWLLYYAEYLVYVFI

SEQ ID NO: 115 - protein, 323 aa, Artificial Sequence
  Synthetic
MSAGSDQIEGSPHHESDNSIATKILNFGHTCWKLQRPYVVKGMISIACGLFGRELLHNTNLISWSLMFKAFFALVPILSFNFFAAIMNQIYDVDIDRINKPDLPLVSGEMSIETAWILSIIVALTGLIVTIKMKGGPLFVFIYIFGIFAGFAYSVPPIRWKQYPFTNFLITISSHVGLAFTSYYASRAALGLPFELRPSFSFIIAFMTVMGMTIAFAKDISDIEGDAKYGVSTVATKLGARNMTFVVSGVLLLNYLVSISAGIIWPQAFNSNIMILSHAILAFCLIFQTRELALANYASAPSRQFFEFIWLLYYAEYLVYVFI

SEQ ID NO: 116 - protein, 323 aa, Artificial Sequence
  Synthetic
MSAGSDQIEGSPHHESDNSIATKILNFGHTCWKLQRPYVVKGMISIACGLFGRELFHNTNLLSWSLMLKAFSSLMVILSFNFFAAIMNQIYDVDIDRINKPDLPLVSGEMSIETAWILSIIVALTGLILTIKLNCGPLFISLYCVSIFAGFAYSVPPIRWKQYPFTNFLITISSHVGVNFTCYYASRAAFGLPFEMSPPFTFILAFMTVMGMTIAFAKDISDIEGDAKYGVSTVATKLGARNMTFVVSGVLLLTYVSAILAAIIWPQAFKSNVMLLSHAILAFCLIFQTRELALANYASAPSRQFFEFIWKLHYAEYLVYVFI

SEQ ID NO: 117 - protein, 322 aa, Artificial Sequence
  Synthetic
MSAGSDQIEGSPHHESDNSIATKILNFGHTCWKLQRPYVVKGMISIACGLFGRELFNNRHLFSWGLMWKAFFALVPILSFNFFAAIMNQIYDVDIDRINKPDLPLVSGEMSIETAWILSIIVALTGLIVTIKLKSAPLFVFIYIFGIFAGFAYSVPPIRWKQYPFTNFLITISSHVGLAFTSYSATTSALGLPFVWRPAFSFIIAFMTVMGMTIAFAKDISDIEGDAKYGVSTVATKLGARNMTFVVSGVLLLNYLVSISIGIIWPFLWSKVVTVLGHTILASILWTNAKSVDLSSKAAITSFYMFIWKLFYAEYLLIPLVR

SEQ ID NO: 118 - protein, 323 aa, Artificial Sequence
  Synthetic
MSAGSDQIEGSPHHESDNSIATKILNFGHTCWKLQRPYVVKGMISIACGLFGRELLHNTNLISWSLMWKAFFALVPILSFNFFAAIMNQIYDVDIDRINKPDLPLVSGEMSIETAWILSIIVALTGLIVTIKMKGGPLFVFIYIFGIFAGFAYSVPPIRWKQYPFTNFLITISSHVGLAFTSYSASRAALGLPFELRPAFSFIIAFMTVMGMTIAFAKDISDIEGDAKYGVSTVATKLGARNMTFVVSGVLLLNYLVSISIGIIWPQAFNSNIMILSHAILAFCLIFQTRELALANYASAPSRQFFEFIWLLYYAEYFVYVFI

SEQ ID NO: 119 - protein, 323 aa, Artificial Sequence
  Synthetic
MSAGSDQIEGSPHHESDNSIATKILNFGHTCWKLQRPYVVKGMISIACGLFGRELFHNTNLLSWSLMLKAFFALVPILSFNFFAAIMNQIYDVDIDRINKPDLPLVSGEMSIETAWILSIIVALTGLIVTIKLNCGPLFVFIYIFGIFAGFAYSVPPIRWKQYPFTNFLITISSHVGLAFTSYYASRAAFGLPFEMSPPFSFIIAFMTVMGMTIAFAKDISDIEGDAKYGVSTVATKLGARNMTFVVSGVLLLNYLVSISAAIIWPQAFKSNIMILSHAILAFCLIFQTRELALANYASAPSRQFFEFIWLLYYAEYLVYVFI

SEQ ID NO: 120 - protein, 323 aa, Artificial Sequence
  Synthetic
MSAGSDQIEGSPHHESDNSIATKILNFGHTCWKLQRPYVVKGMISIACGLFGRELFHNTNLLSWSLMWKAFFALVPILSFNFFAAIMNQIYDVDIDRINKPDLPLVSGEMSIETAWILSIIVALTGLIVTIKLNCGPLFVFIYIFGIFAGFAYSVPPIRWKQYPFTNFLITISSHVGLAFTSYSASRAAFGLPFEMSPAFSFIIAFMTVMGMTIAFAKDISDIEGDAKYGVSTVATKLGARNMTFVVSGVLLLNYLVSISIAIIWPQAFKSNIMILSHAILAFCLIFQTRELALANYASAPSRQFFEFIWLLYYAEYFVYVFI

SEQ ID NO: 121 - protein, 323 aa, Artificial Sequence
  Synthetic
MSAGSDQIEGSPHHESDNSIATKILNFGHTCWKLQRPYVVKGMISIACGLFGKELLHNTNLISWSLMFKAFFFLVAILSFNFFAAIMNQIYDVDIDRINKPDLPLVSGEMSIETAWILSIIVALFGLIITIKMKGGPLYIFGYCFGIFAGFAYSVPPIRWKQYPFTNFLITISSHVITNFTFYYASRAALGLPFELRPSFTFLLAFMTVMGMTIAFAKDISDIEGDAKYGVSTVATKLGARNMTFVVSGVLLLSYVAAILAGIIWPQAFNSNVMLLSHAILAFCLIFQTRELALANYASAPSRQFFEFIWKLYYAEYLVYVFI

SEQ ID NO: 122 - protein, 679 aa, Artificial Sequence
  Synthetic
MASEKEIRRERFLNVFPKLVEELNASLLAYGMPKEACDWYAHSLNYNTPGGKLNRGLSVVDTYAILSNKTVEQLGQEEYEKVAILGWCIELLQAYWLVADDMMDKSITRRGQPCWYKVPEVGEIAIWDAFMLEAAIYKLLKSHFRNEKYYIDITELFHEVTFQTELGQLMDLITAPEDKVDLSKFSLKKHSFIVTFKTAYYSFYLPVALAMYVAGITDEKDLKQARDVLIPLGEYFQIQDDYLDCFGTPEQIGKIGTDIQDNKCSWVINKALELASAEQRKTLDENYGKKDSVAEAKCKKIFNDLKIEQLYHEYEESIAKDLKAKISQVDESRGFKADVLTAFLNKVYKRSKGGGGSSAGSDQIEGSPHHESDNSIATKILNFGHTCWKLQRPYVVKGMISIACGLFGRELFNNRHLFSWGLMWKAFFALVPILSFNFFAAIMNQIYDVDIDRINKPDLPLVSGEMSIETAWILSIIVALTGLIVTIKLKSAPLFVFIYIFGIFAGFAYSVPPIRWKQYPFTNFLITISSHVGLAFTSYSATTSALGLPFVWRPAFSFIIAFMTVMGMTIAFAKDISDIEGDAKYGVSTVATKLGARNMTFVVSGVLLLNYLVSISIGIIWPQVFKSNIMILSHAILAFCLIFQTRELALANYASAPSRQFFEFIWLLYYAEYFVYVFI

SEQ ID NO: 123 - protein, 678 aa, Artificial Sequence
  Synthetic
MASEKEIRRERFLNVFPKLVEELNASLLAYGMPKEACDWYAHSLNYNTPGGKLNRGLSVVDTYAILSNKTVEQLGQEEYEKVAILGWCIELLQAYWLVADDMMDKSITRRGQPCWYKVPEVGEIAIWDAFMLEAAIYKLLKSHFRNEKYYIDITELFHEVTFQTELGQLMDLITAPEDKVDLSKFSLKKHSFIVTFKTAYYSFYLPVALAMYVAGITDEKDLKQARDVLIPLGEYFQIQDDYLDCFGTPEQIGKIGTDIQDNKCSWVINKALELASAEQRKTLDENYGKKDSVAEAKCKKIFNDLKIEQLYHEYEESIAKDLKAKISQVDESRGFKADVLTAFLNKVYKRSKGGGGSGGGGSGGGGSHHESDNSIATKILNFGHTCWKLQRPYVVKGMISIACGLFGRELFNNRHLFSWGLMWKAFFALVPILSFNFFAAIMNQIYDVDIDRINKPDLPLVSGEMSIETAWILSIIVALTGLIVTIKLKSAPLFVFIYIFGIFAGFAYSVPPIRWKQYPFTNFLITISSHVGLAFTSYSATTSALGLPFVWRPAFSFIIAFMTVMGMTIAFAKDISDIEGDAKYGVSTVATKLGARNMTFVVSGVLLLNYLVSISIGIIWPQVFKSNIMILSHAILAFCLIFQTRELALANYASAPSRQFFEFIWLLYYAEYFVYVFI

SEQ ID NO: 124 - protein, 698 aa, Artificial Sequence
  Synthetic
MASEKEIRRERFLNVFPKLVEELNASLLAYGMPKEACDWYAHSLNYNTPGGKLNRGLSVVDTYAILSNKTVEQLGQEEYEKVAILGWCIELLQAYWLVADDMMDKSITRRGQPCWYKVPEVGEIAIWDAFMLEAAIYKLLKSHFRNEKYYIDITELFHEVTFQTELGQLMDLITAPEDKVDLSKFSLKKHSFIVTFKTAYYSFYLPVALAMYVAGITDEKDLKQARDVLIPLGEYFQIQDDYLDCFGTPEQIGKIGTDIQDNKCSWVINKALELASAEQRKTLDENYGKKDSVAEAKCKKIFNDLKIEQLYHEYEESIAKDLKAKISQVDESRGFKADVLTAFLNKVYKRSKGGGGSGGGGSGGGGSGGGGSGGGGSGGGGSGGGGSHHESDNSIATKILNFGHTCWKLQRPYVVKGMISIACGLFGRELFNNRHLFSWGLMWKAFFALVPILSFNFFAAIMNQIYDVDIDRINKPDLPLVSGEMSIETAWILSIIVALTGLIVTIKLKSAPLFVFIYIFGIFAGFAYSVPPIRWKQYPFTNFLITISSHVGLAFTSYSATTSALGLPFVWRPAFSFIIAFMTVMGMTIAFAKDISDIEGDAKYGVSTVATKLGARNMTFVVSGVLLLNYLVSISIGIIWPQVFKSNIMILSHAILAFCLIFQTRELALANYASAPSRQFFEFIWLLYYAEYFVYVFI

SEQ ID NO: 125 - protein, 693 aa, Artificial Sequence
  Synthetic
MASEKEIRRERFLNVFPKLVEELNASLLAYGMPKEACDWYAHSLNYNTPGGKLNRGLSVVDTYAILSNKTVEQLGQEEYEKVAILGWCIELLQAYWLVADDMMDKSITRRGQPCWYKVPEVGEIAIWDAFMLEAAIYKLLKSHFRNEKYYIDITELFHEVTFQTELGQLMDLITAPEDKVDLSKFSLKKHSFIVTFKTAYYSFYLPVALAMYVAGITDEKDLKQARDVLIPLGEYFQIQDDYLDCFGTPEQIGKIGTDIQDNKCSWVINKALELASAEQRKTLDENYGKKDSVAEAKCKKIFNDLKIEQLYHEYEESIAKDLKAKISQVDESRGFKADVLTAFLNKVYKRSKGGGGSGGGGSGGGGSGGGGSGGGGSIEGSPHHESDNSIATKILNFGHTCWKLQRPYVVKGMISIACGLFGRELFNNRHLFSWGLMWKAFFALVPILSFNFFAAIMNQIYDVDIDRINKPDLPLVSGEMSIETAWILSIIVALTGLIVTIKLKSAPLFVFIYIFGIFAGFAYSVPPIRWKQYPFTNFLITISSHVGLAFTSYSATTSALGLPFVWRPAFSFIIAFMTVMGMTIAFAKDISDIEGDAKYGVSTVATKLGARNMTFVVSGVLLLNYLVSISIGIIWPQVFKSNIMILSHAILAFCLIFQTRELALANYASAPSRQFFEFIWLLYYAEYFVYVFI

SEQ ID NO: 126 - protein, 708 aa, Artificial Sequence
  Synthetic
MASEKEIRRERFLNVFPKLVEELNASLLAYGMPKEACDWYAHSLNYNTPGGKLNRGLSVVDTYAILSNKTVEQLGQEEYEKVAILGWCIELLQAYWLVADDMMDKSITRRGQPCWYKVPEVGEIAIWDAFMLEAAIYKLLKSHFRNEKYYIDITELFHEVTFQTELGQLMDLITAPEDKVDLSKFSLKKHSFIVTFKTAYYSFYLPVALAMYVAGITDEKDLKQARDVLIPLGEYFQIQDDYLDCFGTPEQIGKIGTDIQDNKCSWVINKALELASAEQRKTLDENYGKKDSVAEAKCKKIFNDLKIEQLYHEYEESIAKDLKAKISQVDESRGFKADVLTAFLNKVYKRSKGGGGSGGGGSGGGGSGGGGSGGGGSGGGGSGGGGSGGGGSGGGGSHHESDNSIATKILNFGHTCWKLQRPYVVKGMISIACGLFGRELFNNRHLFSWGLMWKAFFALVPILSFNFFAAIMNQIYDVDIDRINKPDLPLVSGEMSIETAWILSIIVALTGLIVTIKLKSAPLFVFIYIFGIFAGFAYSVPPIRWKQYPFTNFLITISSHVGLAFTSYSATTSALGLPFVWRPAFSFIIAFMTVMGMTIAFAKDISDIEGDAKYGVSTVATKLGARNMTFVVSGVLLLNYLVSISIGIIWPQVFKSNIMILSHAILAFCLIFQTRELALANYASAPSRQFFEFIWLLYYAEYFVYVFI

SEQ ID NO: 127 - protein, 713 aa, Artificial Sequence
  Synthetic
MASEKEIRRERFLNVFPKLVEELNASLLAYGMPKEACDWYAHSLNYNTPGGKLNRGLSVVDTYAILSNKTVEQLGQEEYEKVAILGWCIELLQAYWLVADDMMDKSITRRGQPCWYKVPEVGEIAIWDAFMLEAAIYKLLKSHFRNEKYYIDITELFHEVTFQTELGQLMDLITAPEDKVDLSKFSLKKHSFIVTFKTAYYSFYLPVALAMYVAGITDEKDLKQARDVLIPLGEYFQIQDDYLDCFGTPEQIGKIGTDIQDNKCSWVINKALELASAEQRKTLDENYGKKDSVAEAKCKKIFNDLKIEQLYHEYEESIAKDLKAKISQVDESRGFKADVLTAFLNKVYKRSKGGGGSGGGGSGGGGSGGGGSGGGGSGGGGSGGGGSGGGGSGGGGSIEGSPHHESDNSIATKILNFGHTCWKLQRPYVVKGMISIACGLFGRELFNNRHLFSWGLMWKAFFALVPILSFNFFAAIMNQIYDVDIDRINKPDLPLVSGEMSIETAWILSIIVALTGLIVTIKLKSAPLFVFIYIFGIFAGFAYSVPPIRWKQYPFTNFLITISSHVGLAFTSYSATTSALGLPFVWRPAFSFIIAFMTVMGMTIAFAKDISDIEGDAKYGVSTVATKLGARNMTFVVSGVLLLNYLVSISIGIIWPQVFKSNIMILSHAILAFCLIFQTRELALANYASAPSRQFFEFIWLLYYAEYFVYVFI

SEQ ID NO: 128 - protein, 683 aa, Artificial Sequence
  Synthetic
MASEKEIRRERFLNVFPKLVEELNASLLAYGMPKEACDWYAHSLNYNTPGGKLNRGLSVVDTYAILSNKTVEQLGQEEYEKVAILGWCIELLQAYWLVADDMMDKSITRRGQPCWYKVPEVGEIAIWDAFMLEAAIYKLLKSHFRNEKYYIDITELFHEVTFQTELGQLMDLITAPEDKVDLSKFSLKKHSFIVTFKTAYYSFYLPVALAMYVAGITDEKDLKQARDVLIPLGEYFQIQDDYLDCFGTPEQIGKIGTDIQDNKCSWVINKALELASAEQRKTLDENYGKKDSVAEAKCKKIFNDLKIEQLYHEYEESIAKDLKAKISQVDESRGFKADVLTAFLNKVYKRSKGGGGSGGGGSGGGGSIEGSPHHESDNSIATKILNFGHTCWKLQRPYVVKGMISIACGLFGRELFNNRHLFSWGLMWKAFFALVPILSFNFFAAIMNQIYDVDIDRINKPDLPLVSGEMSIETAWILSIIVALTGLIVTIKLKSAPLFVFIYIFGIFAGFAYSVPPIRWKQYPFTNFLITISSHVGLAFTSYSATTSALGLPFVWRPAFSFIIAFMTVMGMTIAFAKDISDIEGDAKYGVSTVATKLGARNMTFVVSGVLLLNYLVSISIGIIWPQVFKSNIMILSHAILAFCLIFQTRELALANYASAPSRQFFEFIWLLYYAEYFVYVFI

SEQ ID NO: 129 - protein, 688 aa, Artificial Sequence
  Synthetic
MASEKEIRRERFLNVFPKLVEELNASLLAYGMPKEACDWYAHSLNYNTPGGKLNRGLSVVDTYAILSNKTVEQLGQEEYEKVAILGWCIELLQAYWLVADDMMDKSITRRGQPCWYKVPEVGEIAIWDAFMLEAAIYKLLKSHFRNEKYYIDITELFHEVTFQTELGQLMDLITAPEDKVDLSKFSLKKHSFIVTFKTAYYSFYLPVALAMYVAGITDEKDLKQARDVLIPLGEYFQIQDDYLDCFGTPEQIGKIGTDIQDNKCSWVINKALELASAEQRKTLDENYGKKDSVAEAKCKKIFNDLKIEQLYHEYEESIAKDLKAKISQVDESRGFKADVLTAFLNKVYKRSKGGGGSGGGGSGGGGSGGGGSGGGGSHHESDNSIATKILNFGHTCWKLQRPYVVKGMISIACGLFGRELFNNRHLFSWGLMWKAFFALVPILSFNFFAAIMNQIYDVDIDRINKPDLPLVSGEMSIETAWILSIIVALTGLIVTIKLKSAPLFVFIYIFGIFAGFAYSVPPIRWKQYPFTNFLITISSHVGLAFTSYSATTSALGLPFVWRPAFSFIIAFMTVMGMTIAFAKDISDIEGDAKYGVSTVATKLGARNMTFVVSGVLLLNYLVSISIGIIWPQVFKSNIMILSHAILAFCLIFQTRELALANYASAPSRQFFEFIWLLYYAEYFVYVFI

SEQ ID NO: 130 - protein, 699 aa, Artificial Sequence
  Synthetic
MASEKEIRRERFLNVFPKLVEELNASLLAYGMPKEACDWYAHSLNYNTPGGKLNRGLSVVDTYAILSNKTVEQLGQEEYEKVAILGWCIELLQAYWLVADDMMDKSITRRGQPCWYKVPEVGEIAIWDAFMLEAAIYKLLKSHFRNEKYYIDITELFHEVTFQTELGQLMDLITAPEDKVDLSKFSLKKHSFIVTFKTAYYSFYLPVALAMYVAGITDEKDLKQARDVLIPLGEYFQIQDDYLDCFGTPEQIGKIGTDIQDNKCSWVINKALELASAEQRKTLDENYGKKDSVAEAKCKKIFNDLKIEQLYHEYEESIAKDLKAKISQVDESRGFKADVLTAFLNKVYKRSKGGGGSGGGGSGGGGSGGGGSGGGGSSAGSDQIEGSPHHESDNSIATKILNFGHTCWKLQRPYVVKGMISIACGLFGRELFNNRHLFSWGLMWKAFFALVPILSFNFFAAIMNQIYDVDIDRINKPDLPLVSGEMSIETAWILSIIVALTGLIVTIKLKSAPLFVFIYIFGIFAGFAYSVPPIRWKQYPFTNFLITISSHVGLAFTSYSATTSALGLPFVWRPAFSFIIAFMTVMGMTIAFAKDISDIEGDAKYGVSTVATKLGARNMTFVVSGVLLLNYLVSISIGIIWPQVFKSNIMILSHAILAFCLIFQTRELALANYASAPSRQFFEFIWLLYYAEYFVYVFI

SEQ ID NO: 131 - protein, 719 aa, Artificial Sequence
  Synthetic
MASEKEIRRERFLNVFPKLVEELNASLLAYGMPKEACDWYAHSLNYNTPGGKLNRGLSVVDTYAILSNKTVEQLGQEEYEKVAILGWCIELLQAYWLVADDMMDKSITRRGQPCWYKVPEVGEIAIWDAFMLEAAIYKLLKSHFRNEKYYIDITELFHEVTFQTELGQLMDLITAPEDKVDLSKFSLKKHSFIVTFKTAYYSFYLPVALAMYVAGITDEKDLKQARDVLIPLGEYFQIQDDYLDCFGTPEQIGKIGTDIQDNKCSWVINKALELASAEQRKTLDENYGKKDSVAEAKCKKIFNDLKIEQLYHEYEESIAKDLKAKISQVDESRGFKADVLTAFLNKVYKRSKGGGGSGGGGSGGGGSGGGGSGGGGSGGGGSGGGGSGGGGSGGGGSSAGSDQIEGSPHHESDNSIATKILNFGHTCWKLQRPYVVKGMISIACGLFGRELFNNRHLFSWGLMWKAFFALVPILSFNFFAAIMNQIYDVDIDRINKPDLPLVSGEMSIETAWILSIIVALTGLIVTIKLKSAPLFVFIYIFGIFAGFAYSVPPIRWKQYPFTNFLITISSHVGLAFTSYSATTSALGLPFVWRPAFSFIIAFMTVMGMTIAFAKDISDIEGDAKYGVSTVATKLGARNMTFVVSGVLLLNYLVSISIGIIWPQVFKSNIMILSHAILAFCLIFQTRELALANYASAPSRQFFEFIWLLYYAEYFVYVFI

SEQ ID NO: 132 - protein, 709 aa, Artificial Sequence
  Synthetic
MASEKEIRRERFLNVFPKLVEELNASLLAYGMPKEACDWYAHSLNYNTPGGKLNRGLSVVDTYAILSNKTVEQLGQEEYEKVAILGWCIELLQAYWLVADDMMDKSITRRGQPCWYKVPEVGEIAIWDAFMLEAAIYKLLKSHFRNEKYYIDITELFHEVTFQTELGQLMDLITAPEDKVDLSKFSLKKHSFIVTFKTAYYSFYLPVALAMYVAGITDEKDLKQARDVLIPLGEYFQIQDDYLDCFGTPEQIGKIGTDIQDNKCSWVINKALELASAEQRKTLDENYGKKDSVAEAKCKKIFNDLKIEQLYHEYEESIAKDLKAKISQVDESRGFKADVLTAFLNKVYKRSKGGGGSGGGGSGGGGSGGGGSGGGGSGGGGSGGGGSSAGSDQIEGSPHHESDNSIATKILNFGHTCWKLQRPYVVKGMISIACGLFGRELFNNRHLFSWGLMWKAFFALVPILSFNFFAAIMNQIYDVDIDRINKPDLPLVSGEMSIETAWILSIIVALTGLIVTIKLKSAPLFVFIYIFGIFAGFAYSVPPIRWKQYPFTNFLITISSHVGLAFTSYSATTSALGLPFVWRPAFSFIIAFMTVMGMTIAFAKDISDIEGDAKYGVSTVATKLGARNMTFVVSGVLLLNYLVSISIGIIWPQVFKSNIMILSHAILAFCLIFQTRELALANYASAPSRQFFEFIWLLYYAEYFVYVFI

SEQ ID NO: 133 - DNA, 972 bp, Artificial Sequence
  Synthetic
atgtcggcggggagtgaccaaattgagggctccccccatcacgaatcagataatagcatagcaaccaagatcctcaacttcggtcatacgtgctggaaactacagcgtccatatgtagttaaaggaatgatttctattgcttgtggtttatttggtagagaattgtttcacaatacaaaccttctgtcttggagtttgatgttaaaggcattctcgtcactaatggtcatattgtcttttaatttctttgctgccatcatgaatcaaatttacgatgttgatatagaccgaattaacaaaccggatttacctctcgtgtccggagaaatgtcaatcgaaactgcttggatactttctattatcgtagccctgaccggcttgatattaactatcaagcttaattgtggtcctctattcattagcttgtattgtgttggaatttttgcgggtttcgcttactcggtcccacccattagatggaagcaatatccatttacaaactttttaataactatctcatcacatgtgggtttgaattttacatgctactatgcaagtagggctgcattcggtcttccttttgagatgtccccaccgttcactttcattttagcctttatgacagttatgggcatgacgatagcatttgccaaagacattagcgatatcgagggggatgcgaaatatggagtaagtacagttgctaccaaactcggcgctagaaatatgacttttgtagtgagcggggtcctgttgttgaattacgtcagtgccatcttagcggcaattatttggccacaggcatttaaatctaacgttatgctgctttcacatgctattctcgctttctgtcttatctttcaaacacgtgaattagccctagctaactatgcgtctgcaccttctaggcagttcttcgaattcatttggctcttgcactacgctgaatatttagtgtacgtttttatataa

SEQ ID NO: 134 - DNA, 972 bp, Artificial Sequence
  Synthetic
atgtctgctggaagtgatcagatagagggttcaccgcatcacgaatcggacaacagcattgcgacgaagatcctgaattttggccatacatgttggaaactacaaagaccatatgtggtcaaagggatgatttccatagcctgcggtcttttcggtcgagaattatttcataataccaacttgttatcatggtctttgatgctcaaggcattctttgctttggtacccattttatcattcaattttttcgcagctatcatgaaccaaatttacgatgttgacatcgataggataaataaaccagatctacctcttgttagtggagaaatgtccattgagactgcctggatactgtctattattgtagccctaactggcttgattgttacaatcaaattaaactgtggtcctttatttgtctttatttatatattcgggatcttcgcaggttttgcgtacagcgtgccaccgattcgttggaagcaatacccatttacaaatttccttatcaccattagttcacacgtgggcttggcgtttacgtcttattatgctagcagagctgcctttggactgccttttgaaatgtccccacctttctctttcatcatagcattcatgactgttatgggtatgacaattgcatttgctaaagacatttccgatatagaaggggatgcaaagtacggtgtctcgactgtagctacaaaattgggcgcgagaaatatgacctttgttgtgtctggtgttttattgctaaattatctggtttccatattggccgctataatttggccgcaggcatttaaatctaatgtcatgatactcagtcacgctatcttagcattctgcttgatttttcaaactagagagctggctctcgcgaactatgcctcagccccctcaaggcaattttttgaattcatctggctcctttactatgcggagtacttagtatacgtgttcatttaa

SEQ ID NO: 135 - DNA, 978 bp, Artificial Sequence
  Synthetic
atgtcagctggttccgaccaaattgaagggagcccgcatcacgagagtgataactctatcgcaacaaagatattgaatttcggccatacttgctggaaactgcagaggccatatgtagtgaaaggaatgatttctatcgcctgtggtctttttggtcgtgaaaaactatcagatttttctcctttattctttgttgggatgtggaaggcgtttttcgctttagttccaattttgagttttaatttctttgcagctataatgaaccaaatttacgacgtcgatatagatcgcatcaataagcccgacttacctctcgtttcgggagaaatgtcaatagagactgcctggatcctttccattattgtagcattgaccggtctgatagtgacgattttggtcggctcttggccattgttcgtttttatctatatattcggaatttttgcaggctttgcttactccgttccgcctatccgatggaaacaatatccatttacaaacttcctaattaccatctcaagccacgtcggtttagctttcactagctatagtcatattcagacacacgtatttaaaagaccagcagtattttcgagagccttcagtttcatcatagcttttatgacagtgatgggtatgactattgcctttgccaaggatatttctgatatagaaggagatgcgaaatacggggttagtaccgtcgctacgaagttaggtgcgagaaatatgacgtttgtggttagcggtgtactcttattgaactatctggtgtctatttctattggtgctagctcagggttcctttggagcaaaaatataatgatcttatcacatgcaattctcgctttctgtcttatattccaaactagggaactagccttggcaaactacgcatccgctccctctaggcagttttttgaatttatttggttgttatactatgctgaatatttcctaattccactagttagataa

SEQ ID NO: 136 - DNA, 972 bp, Artificial Sequence
  Synthetic
atgagcgccgggtcggatcaaattgaaggtagtccgcatcacgagtcagacaattccatcgcgactaaaattctgaacttcggccatacgtgttggaagctccagaggccttatgtcgtaaaaggtatgatatctattgcatgcggattatttggtaaggaattgctacataataccaaccttatctcttggtcattaatgtttaaagctttctttttcttggttgctatattatcctttaatttctttgcagccattatgaaccaaatatacgatgtggacatcgatcgaattaataagcccgatcttccattggttagtggcgagatgagcatagaaacagcttggattctatctattattgtagcactgtttggactcatcataactattaaaatgaaaggtggtccattgtatattttcgggtactgtttcggtatatttgcaggttttgcttattctgtccctccaatcagatggaagcagtaccctttcacaaactttctgataacaatatcgtcacacgtgggaacgaattttactttttattacgcttcgcgtgccgccttgggcttaccgtttgaattaagaccatccttcaccttcttgttagcttttatgacggttatgggtatgacaattgcgttcgcgaaagacatctcagatatcgaaggcgacgcaaaatatggggttagtactgtcgctaccaagctaggagctagaaatatgacttttgttgtatccggagtcctgttactcagttacgtggcagcgattcttgctggtattatctggccacaagcttttaactctaatgtaatgctattgtcacatgccatattggcgttctgtctgatttttcaaactcgcgaacttgctttagccaactatgcatctgcaccttcaaggcaattcttcgaatttatttggaagctatattatgcagagtaccttgtttacgtgtttatctaa

SEQ ID NO: 137 - DNA, 972 bp, Artificial Sequence
  Synthetic
atgtccgcaggatcagatcaaatagaagggagcccccatcacgagtcggacaacagtatcgcgacaaaaattcttaattttggccatacttgttggaagttacagcgtccttacgtagttaaaggtatgatttctatcgcttgcggtttgttcggtaaggaactactccacaatacgaacttgatatcatggtctttaatgtttaaagccttctttgctctggtcccaattctaagtttcaattttttcgcagccattatgaatcaaatctatgatgttgacatagataggattaacaagccggatttaccactcgtgtccggagaaatgtctatagagacagcttggatcctgtcgattattgtcgctcttactggcttgatagttaccattaaaatgaaaggtggccctttatttgtgtttatctatatatttggtatattcgcaggttttgcttactctgtacctccaattcgatggaagcagtatccgttcactaactttttgatcaccatttcaagccatgttggactagccttcacatcctactatgcttctagagccgcgcttggtctaccatttgaactgcgcccctcatttagttttataattgcattcatgacagttatggggatgactattgcctttgcaaaggacatttcagatattgaaggagatgcaaaatatggtgtctctacggtagctactaaattaggtgctagaaatatgaccttcgttgtgtcgggggtgttgctattaaattacttagtcagtattttggcaggaataatctggccccaagcttttaattcaaatgtcatgatcttatcgcacgcaattttggccttctgtctcatctttcaaacgagagaattagcccttgctaactacgcaagtgctccttcccgtcaatttttcgagtttatttggttgctgtattatgcggaatacctggtatacgttttcatttaa

SEQ ID NO: 138 - DNA, 972 bp, Artificial Sequence
  Synthetic
atgtctgcaggaagtgatcagatagaaggcagcccccaccatgagtccgacaattcgatcgccacaaagattttaaactttggtcatacctgttggaaacttcaaaggccttacgtcgttaaagggatgatttctatcgcgtgcggtctattcggtcgcgaactgttgcacaatacgaacttaatatcatggagtctcatgtttaaggctttctttgctttggtaccaattctgtcattcaatttttttgcagccataatgaaccaaatttatgatgtggacatcgatagaattaataaaccggatttacctttggtttctggggagatgtcaatagaaactgcttggatactatccattatcgtggcactaacaggccttattgttactattaaaatgaagggtggaccactttttgtattcatatatatcttcggtatttttgcgggcttcgcttactcggtcccaccgatcagatggaaacagtatccttttacgaacttcttaatcactatttcatcgcatgttggattagcttttacctcttattacgccagtcgtgcagctttgggtttgccatttgaattgcggccaagcttcagcttcatcatagcctttatgacagttatgggtatgactattgcatttgcgaaagacatatccgatattgaaggcgacgccaagtatggtgtgtctaccgtagcaacaaagctgggggctcgaaatatgacttttgtcgtcagtggagttctgttgttaaactaccttgtatcaattagtgctggcattatatggccacaagcatttaattctaatattatgatcctgtcacacgctattttagcgttctgtttgatctttcaaacaagggagcttgcattggcgaattatgcttctgcaccctccaggcagttctttgaatttatatggttactgtattacgcagagtacctagtgtatgttttcatttaa

SEQ ID NO: 139 - DNA, 972 bp, Artificial Sequence
  Synthetic
atgtcagccgggagcgaccagatagaaggaagtcctcatcacgagtctgataactccattgcgacaaaaatcctgaatttcggtcatacgtgctggaagttacaaaggccctatgtcgtgaaaggtatgatttcgatagcttgtggcttgtttggtcgcgaactatttcataataccaaccttttatcttggtcattgatgctcaaggcattctcatccttaatggtaatcctttcttttaatttctttgctgccataatgaatcaaatttacgatgttgatattgaccgaattaacaaaccagatttgccactcgttagtggagagatgagtatcgaaactgcatggatactatcgatcattgtcgctctgacaggcttaatattgactattaagcttaattgtggtccgctatttatatcattgtattgcgtatctattttcgctggatttgcatacagcgttcctccaattcgttggaaacagtatcctttcaccaacttcttaataactatcagctcacacgtgggtgttaactttacatgttattacgcctccagagcagcctttggcttacccttcgaaatgtctccgccatttacttttattctcgcttttatgaccgtaatgggaatgacaatagctttcgcgaaagacatttcagatatcgaaggtgatgcgaaatatggggtgtctactgttgctacgaagttaggtgcaagaaatatgacgtttgttgtcagtggtgtcttgttgctgacatacgtaagcgctatacttgcagctatcatttggccgcaagcctttaagtcaaatgtgatgttgttatctcatgccatcctggcgttctgcctaattttccaaactagagagctagcgcttgcaaattatgcttctgcacctagtaggcagttttttgaatttatctggaaattgcattatgcagagtacttagtttatgttttcatctaa

SEQ ID NO: 140 - DNA, 969 bp, Artificial Sequence
  Synthetic
atgtccgcaggttctgaccagattgagggaagtccgcaccatgaatcagataattcgatagctacaaagatccttaactttggccatacctgctggaaattgcaacgtccatatgttgtcaaagggatgattagcattgcgtgtggtctgttcggtagggaactatttaataacagacacttattctcttggggattgatgtggaaggccttttttgctctcgtgcccatactgagtttcaatttctttgcagctatcatgaaccaaatatacgatgtagatatcgaccgaattaataaacctgatttaccactagtttcaggcgagatgtctattgaaacggcgtggatactttcgatcattgtagccttgactggtttaatagttactattaagttaaaatccgcacctctctttgtctttatttatatatttggtatcttcgctgggtttgcttactcagtgccacccattagatggaagcaatatcctttcacaaattttttgataaccattagttcgcatgttggattggccttcactagctactctgcaacaacgtccgcccttggcttaccatttgtatggcgccccgcttttagcttcattattgcatttatgaccgttatgggtatgacaatcgcattcgccaaagacatttcagatatagaaggggatgctaaatatggtgtctctactgtcgccacaaagctgggagctagaaacatgactttcgtggttagtggtgtattgcttctaaattatttagtgtccatctccataggaatcatctggccgtttctttggtctaaagttgtaactgttctaggtcatactattctcgcatcaattttatggacaaacgcgaagagcgttgatttgtcgtctaaagccgcaataacgtcgttctacatgtttatttggaaactattttatgcagaatatcttttgattccgttagtgaggtaa

SEQ ID NO: 141 - DNA, 972 bp, Artificial Sequence
  Synthetic
atgagtgccggttctgatcaaattgaaggatcaccgcatcacgagagcgacaactccatcgcaacaaaaatacttaatttcggccatacttgttggaagttacagcgtccatatgtagtgaaagggatgatttcgattgcttgcggtctatttggaagggaattgttacacaatacgaacctgatatcttggtcattgatgtggaaggcttttttcgcactcgttcccatccttagttttaatttctttgcggccattatgaaccaaatctacgatgttgacatagatcgaatcaataaacctgatctgcctttagtctcaggcgaaatgtctattgagacagcttggatattgtccattatcgttgctttaaccggtctaattgtcactattaagatgaaaggtggaccactgttcgtatttatttatatatttggtatattcgcagggttcgcgtacagcgtgccacctattcgctggaagcagtatccatttactaactttcttattacgatttcatcccatgttggtttggcgtttacctcttactctgcaagtagagccgcactagggctccctttcgaattaagacccgctttctcttttataatagcttttatgacagtgatgggcatgactatagccttcgctaaagacatctcagatatcgaaggtgatgcaaaatatggcgtaagcaccgtcgctacaaagctgggtgccagaaatatgacatttgtagtttccggagtactgttattgaactatcttgtttcgatctcaatcggaattatttggccgcaagcttttaattcaaatataatgatattatctcatgccattttggcattctgtttaatctttcaaactagggagttggcattggcgaactacgcatctgcgccaagtagacaatttttcgaatttatatggctgctttactatgctgaatattttgtctatgttttcatttaa

SEQ ID NO: 142 - DNA, 972 bp, Artificial Sequence
  Synthetic
atgtctgcgggctcagaccaaatagaaggatccccccatcacgagagtgataacagcatcgctacaaaaattcttaattttgggcatacctgctggaagttgcagcggccatatgtcgtgaaaggtatgatttcaatagcctgtggtctgttcggtagagaactatttcataatactaacttattgtcttggtcgttaatgctcaaggcatttttcgctctagtacctatcttatcattcaattttttcgccgcaattatgaatcaaatatacgatgttgacattgatcgtatcaacaaaccggatttaccactcgtttcgggagaaatgtctattgagactgcttggatattgagtattatcgtagcgttgacgggccttatagttacaattaaattgaattgtggacctttgtttgtctttatctatatcttcggtattttcgccggttttgcttacagtgtgccacctataaggtggaagcaatatccttttacaaactttctaattaccatatcctcgcacgtcggtttagcattcacctcttattacgcctctagagcagcttttggccttccattcgaaatgagccccccgttttccttcattatagcatttatgactgtgatgggtatgacgatcgcgttcgctaaagatatttcagacatagaaggggacgccaagtacggagtttcaactgtagctactaagttgggcgctagaaatatgacatttgttgtatctggtgtcctgttactaaactatttagttagcatttctgcagcaatcatctggcctcaggccttcaaatcgaatattatgattctctctcatgcaattcttgcgttttgcctgatttttcaaactcgcgagctcgccctcgctaattacgcatccgcgccatctcgtcaatttttcgaatttatttggctattgtattatgctgaatatttagtgtacgtctttatataa

SEQ ID NO: 143 - DNA, 972 bp, Artificial Sequence
  Synthetic
atgagtgcaggatcagaccaaatcgaggggtccccacatcacgaatctgataatagcatagccaccaaaattttgaactttggccatacatgttggaagttacagcgtccctatgttgtgaaaggtatgatttcgatagcttgcggtctgttcggtagagaactatttcataatactaacctcctttcttggtcattgatgtggaaggcgttctttgctcttgtcccgatcttgtcctttaatttcttcgcagccattatgaaccaaatttacgatgttgacatagatcggatcaataaacctgatttacctttagtaagtggcgaaatgtctattgagactgcttggatcttaagcattatagttgcactaacaggactgatcgtaacgataaagctaaattgtggtccattgtttgtctttatttatattttcgggatttttgctggttttgcttactcagtgccaccaataaggtggaaacaatatcctttcactaactttcttatcaccatatcgtcacacgttggcctcgcatttacatcgtactctgcctctagagcagctttcggattacccttcgaaatgagtccggcgttctcctttattattgcttttatgactgtaatgggtatgacaattgcgttcgccaaagatatatctgacatcgagggtgacgctaagtatggagtgagtaccgtcgcaaccaaactcggcgctcgcaacatgacgtttgttgtttctggggtcttgttattaaattaccttgtttccatttcaatcgcaattatatggccacaggcatttaagtcaaatatcatgattctgtcccatgcgatattggccttctgccttatatttcaaacgagagaattggctctggccaactacgctagcgccccttctcgacaatttttcgaatttatttggttgttgtattatgcagaatattttgtgtatgtatttatataa

SEQ ID NO: 144 - DNA, 972 bp, Artificial Sequence
  Synthetic
atgtcggcagggtccgaccagattgaaggctctccacaccatgagtcagataatagtatagcgacaaagatcctaaacttcggtcatacttgctggaaattacaacgaccgtatgtagtcaaaggtatgatttccatcgcctgtggactgtttggaaaggaactcttacataataccaaccttataagctggtcattgatgtttaaagctttcttctttctagttgctattttgtcttttaattttttcgcagcaattatgaaccaaatctacgatgtggacatagatagaattaataagcctgatttgcccttagttagtggtgaaatgtctattgaaacggcctggattctaagcataatagtggctctcttcggccttatcataacaatcaaaatgaaaggtggcccattgtatatatttggttactgtttcggaatttttgcaggctttgcttattcggtacctccaattaggtggaagcagtacccctttactaattttctcatcacaattagttctcacgttattaccaacttcactttctattatgcgtcacgtgccgctttaggtcttccttttgagctgcgcccttcttttactttcttgttagcatttatgaccgtcatgggaatgactatcgcatttgctaaagacatttcggatatagagggggatgctaagtacggtgtttccacagtagcgaccaaattaggcgctagaaatatgacgtttgtggtttcaggtgtgttgttacttagctatgtcgccgccattttggccgggataatctggccacaagcattcaacagtaatgtaatgctgttgtcgcatgcaattcttgcgttctgcctgatctttcaaacgagagaattggcgttagctaattacgcatctgctccctcccggcagttttttgaattcatttggaagctctattatgccgaatacttggtctacgttttcatttaa

SEQ ID NO: 145 - DNA, 2040 bp, Artificial Sequence
  Synthetic
atggcttcagaaaaagaaattaggagagagagattcttgaacgttttccctaaattagtagaggaattgaacgcatcgcttttggcttacggtatgcctaaggaagcatgtgactggtatgcccactcattgaactacaacactccaggcggtaagctaaatagaggtttgtccgttgtggacacgtatgctattctctccaacaagaccgttgaacaattggggcaagaagaatacgaaaaggttgccattctaggttggtgcattgagttgttgcaggcttactggttggtcgccgatgatatgatggacaagtccattaccagaagaggccaaccatgttggtacaaggttcctgaagttggggaaattgccatctgggacgcattcatgttagaggctgctatctacaagcttttgaaatctcacttcagaaacgaaaaatactacatagatatcaccgaattgttccatgaggtcaccttccaaaccgaattgggccaattgatggacttaatcactgcacctgaagacaaagtcgacttgagtaagttctccctaaagaagcactccttcatagttactttcaagactgcttactattctttctacttgcctgtcgcattggccatgtacgttgccggtatcacggatgaaaaggatttgaaacaagccagagatgtcttgattccattgggtgaatacttccaaattcaagatgactacttagactgcttcggtaccccagaacagatcggtaagatcggtacagatatccaagataacaaatgttcttgggtaatcaacaaggcattggaacttgcttccgcagaacaaagaaagactttagacgaaaattacggtaagaaggactcagtcgcagaagccaaatgcaaaaagattttcaatgacttgaaaattgaacagctataccacgaatatgaagagtctattgccaaggatttgaaggccaaaatttctcaggtcgatgagtctcgtggcttcaaagctgatgtcttaactgcgttcttgaacaaagtttacaagagaagcaaaggcggaggtggttcttctgctggctctgaccaaattgaaggttccccgcatcacgaatcagataatagtattgccacaaagatcttaaactttgggcatacatgttggaaattacaaaggccctacgtcgtcaaaggaatgataagcatcgcttgcggtctgttcggaagggaattatttaacaataggcatctattcagctgggggttaatgtggaaagctttcttcgcgttagtgccaatcctaagctttaactttttcgccgccatcatgaaccagatttatgatgttgatatcgacaggataaataagccagatcttccattggtatccggtgaaatgtcaatagaaactgcatggatattatctattatcgttgcgctgaccggactgatagtaacaatcaaattgaaatctgcacccctgtttgtttttatatatatatttggtattttcgctggattcgcttactcagtgccacctatcaggtggaagcagtacccattcacgaattttctgatcacgatctctagccacgtcgggttagcgttcacatcttactctgcaaccacgagtgccttggggcttcctttcgtctggcgtccagcttttagttttatcattgcctttatgaccgtaatgggaatgacgatcgcattcgcaaaggacatttctgacatagagggggatgcaaaatacggtgtctccactgtggcgacaaaattaggagctaggaatatgactttcgtggtgtccggtgtattattactaaattatctggtatctataagtatcggcatcatatggccgcaagtgtttaaatccaacattatgatactgagtcatgctattttggctttttgtctgatttttcagacgcgtgagttggcgcttgcaaactatgcctctgcgcccagcaggcagttttttgaattcatatggttattgtactatgccgagtatttcgtctacgtatttatttaa

SEQ ID NO: 146 - DNA, 2037 bp, Artificial Sequence
  Synthetic
atggcttcagaaaaagaaattaggagagagagattcttgaacgttttccctaaattagtagaggaattgaacgcatcgcttttggcttacggtatgcctaaggaagcatgtgactggtatgcccactcattgaactacaacactccaggcggtaagctaaatagaggtttgtccgttgtggacacgtatgctattctctccaacaagaccgttgaacaattggggcaagaagaatacgaaaaggttgccattctaggttggtgcattgagttgttgcaggcttactggttggtcgccgatgatatgatggacaagtccattaccagaagaggccaaccatgttggtacaaggttcctgaagttggggaaattgccatctgggacgcattcatgttagaggctgctatctacaagcttttgaaatctcacttcagaaacgaaaaatactacatagatatcaccgaattgttccatgaggtcaccttccaaaccgaattgggccaattgatggacttaatcactgcacctgaagacaaagtcgacttgagtaagttctccctaaagaagcactccttcatagttactttcaagactgcttactattctttctacttgcctgtcgcattggccatgtacgttgccggtatcacggatgaaaaggatttgaaacaagccagagatgtcttgattccattgggtgaatacttccaaattcaagatgactacttagactgcttcggtaccccagaacagatcggtaagatcggtacagatatccaagataacaaatgttcttgggtaatcaacaaggcattggaacttgcttccgcagaacaaagaaagactttagacgaaaattacggtaagaaggactcagtcgcagaagccaaatgcaaaaagattttcaatgacttgaaaattgaacagctataccacgaatatgaagagtctattgccaaggatttgaaggccaaaatttctcaggtcgatgagtctcgtggcttcaaagctgatgtcttaactgcgttcttgaacaaagtttacaagagaagcaaaggcggaggtggttctggtgggggtggttcgggtggtggtgggtcacatcacgaatcagataatagtattgccacaaagatcttaaactttgggcatacatgttggaaattacaaaggccctacgtcgtcaaaggaatgataagcatcgcttgcggtctgttcggaagggaattatttaacaataggcatctattcagctgggggttaatgtggaaagctttcttcgcgttagtgccaatcctaagctttaactttttcgccgccatcatgaaccagatttatgatgttgatatcgacaggataaataagccagatcttccattggtatccggtgaaatgtcaatagaaactgcatggatattatctattatcgttgcgctgaccggactgatagtaacaatcaaattgaaatctgcacccctgtttgtttttatatatatatttggtattttcgctggattcgcttactcagtgccacctatcaggtggaagcagtacccattcacgaattttctgatcacgatctctagccacgtcgggttagcgttcacatcttactctgcaaccacgagtgccttggggcttcctttcgtctggcgtccagcttttagttttatcattgcctttatgaccgtaatgggaatgacgatcgcattcgcaaaggacatttctgacatagagggggatgcaaaatacggtgtctccactgtggcgacaaaattaggagctaggaatatgactttcgtggtgtccggtgtattattactaaattatctggtatctataagtatcggcatcatatggccgcaagtgtttaaatccaacattatgatactgagtcatgctattttggctttttgtctgatttttcagacgcgtgagttggcgcttgcaaactatgcctctgcgcccagcaggcagttttttgaattcatatggttattgtactatgccgagtatttcgtctacgtatttatttaa

SEQ ID NO: 147 - DNA, 2097 bp, Artificial Sequence
  Synthetic
atggcttcagaaaaagaaattaggagagagagattcttgaacgttttccctaaattagtagaggaattgaacgcatcgcttttggcttacggtatgcctaaggaagcatgtgactggtatgcccactcattgaactacaacactccaggcggtaagctaaatagaggtttgtccgttgtggacacgtatgctattctctccaacaagaccgttgaacaattggggcaagaagaatacgaaaaggttgccattctaggttggtgcattgagttgttgcaggcttactggttggtcgccgatgatatgatggacaagtccattaccagaagaggccaaccatgttggtacaaggttcctgaagttggggaaattgccatctgggacgcattcatgttagaggctgctatctacaagcttttgaaatctcacttcagaaacgaaaaatactacatagatatcaccgaattgttccatgaggtcaccttccaaaccgaattgggccaattgatggacttaatcactgcacctgaagacaaagtcgacttgagtaagttctccctaaagaagcactccttcatagttactttcaagactgcttactattctttctacttgcctgtcgcattggccatgtacgttgccggtatcacggatgaaaaggatttgaaacaagccagagatgtcttgattccattgggtgaatacttccaaattcaagatgactacttagactgcttcggtaccccagaacagatcggtaagatcggtacagatatccaagataacaaatgttcttgggtaatcaacaaggcattggaacttgcttccgcagaacaaagaaagactttagacgaaaattacggtaagaaggactcagtcgcagaagccaaatgcaaaaagattttcaatgacttgaaaattgaacagctataccacgaatatgaagagtctattgccaaggatttgaaggccaaaatttctcaggtcgatgagtctcgtggcttcaaagctgatgtcttaactgcgttcttgaacaaagtttacaagagaagcaaaggcggaggtggttctggtgggggtggttcgggtggtggtgggtcaggtggtggcggtagcggtggcggtggttccggtggtggtggtagtggaggtgggggttctcatcacgaatcagataatagtattgccacaaagatcttaaactttgggcatacatgttggaaattacaaaggccctacgtcgtcaaaggaatgataagcatcgcttgcggtctgttcggaagggaattatttaacaataggcatctattcagctgggggttaatgtggaaagctttcttcgcgttagtgccaatcctaagctttaactttttcgccgccatcatgaaccagatttatgatgttgatatcgacaggataaataagccagatcttccattggtatccggtgaaatgtcaatagaaactgcatggatattatctattatcgttgcgctgaccggactgatagtaacaatcaaattgaaatctgcacccctgtttgtttttatatatatatttggtattttcgctggattcgcttactcagtgccacctatcaggtggaagcagtacccattcacgaattttctgatcacgatctctagccacgtcgggttagcgttcacatcttactctgcaaccacgagtgccttggggcttcctttcgtctggcgtccagcttttagttttatcattgcctttatgaccgtaatgggaatgacgatcgcattcgcaaaggacatttctgacatagagggggatgcaaaatacggtgtctccactgtggcgacaaaattaggagctaggaatatgactttcgtggtgtccggtgtattattactaaattatctggtatctataagtatcggcatcatatggccgcaagtgtttaaatccaacattatgatactgagtcatgctattttggctttttgtctgatttttcagacgcgtgagttggcgcttgcaaactatgcctctgcgcccagcaggcagttttttgaattcatatggttattgtactatgccgagtatttcgtctacgtatttatttaa

SEQ ID NO: 148 - DNA, 2082 bp, Artificial Sequence
  Synthetic
atggcttcagaaaaagaaattaggagagagagattcttgaacgttttccctaaattagtagaggaattgaacgcatcgcttttggcttacggtatgcctaaggaagcatgtgactggtatgcccactcattgaactacaacactccaggcggtaagctaaatagaggtttgtccgttgtggacacgtatgctattctctccaacaagaccgttgaacaattggggcaagaagaatacgaaaaggttgccattctaggttggtgcattgagttgttgcaggcttactggttggtcgccgatgatatgatggacaagtccattaccagaagaggccaaccatgttggtacaaggttcctgaagttggggaaattgccatctgggacgcattcatgttagaggctgctatctacaagcttttgaaatctcacttcagaaacgaaaaatactacatagatatcaccgaattgttccatgaggtcaccttccaaaccgaattgggccaattgatggacttaatcactgcacctgaagacaaagtcgacttgagtaagttctccctaaagaagcactccttcatagttactttcaagactgcttactattctttctacttgcctgtcgcattggccatgtacgttgccggtatcacggatgaaaaggatttgaaacaagccagagatgtcttgattccattgggtgaatacttccaaattcaagatgactacttagactgcttcggtaccccagaacagatcggtaagatcggtacagatatccaagataacaaatgttcttgggtaatcaacaaggcattggaacttgcttccgcagaacaaagaaagactttagacgaaaattacggtaagaaggactcagtcgcagaagccaaatgcaaaaagattttcaatgacttgaaaattgaacagctataccacgaatatgaagagtctattgccaaggatttgaaggccaaaatttctcaggtcgatgagtctcgtggcttcaaagctgatgtcttaactgcgttcttgaacaaagtttacaagagaagcaaaggcggaggtggttctggtgggggtggttcgggtggtggtgggtcaggtggtggcggtagcggtggcggtggttccattgaaggttccccgcatcacgaatcagataatagtattgccacaaagatcttaaactttgggcatacatgttggaaattacaaaggccctacgtcgtcaaaggaatgataagcatcgcttgcggtctgttcggaagggaattatttaacaataggcatctattcagctgggggttaatgtggaaagctttcttcgcgttagtgccaatcctaagctttaactttttcgccgccatcatgaaccagatttatgatgttgatatcgacaggataaataagccagatcttccattggtatccggtgaaatgtcaatagaaactgcatggatattatctattatcgttgcgctgaccggactgatagtaacaatcaaattgaaatctgcacccctgtttgtttttatatatatatttggtattttcgctggattcgcttactcagtgccacctatcaggtggaagcagtacccattcacgaattttctgatcacgatctctagccacgtcgggttagcgttcacatcttactctgcaaccacgagtgccttggggcttcctttcgtctggcgtccagcttttagttttatcattgcctttatgaccgtaatgggaatgacgatcgcattcgcaaaggacatttctgacatagagggggatgcaaaatacggtgtctccactgtggcgacaaaattaggagctaggaatatgactttcgtggtgtccggtgtattattactaaattatctggtatctataagtatcggcatcatatggccgcaagtgtttaaatccaacattatgatactgagtcatgctattttggctttttgtctgatttttcagacgcgtgagttggcgcttgcaaactatgcctctgcgcccagcaggcagttttttgaattcatatggttattgtactatgccgagtatttcgtctacgtatttatttaa

SEQ ID NO: 149 - DNA, 2127 bp, Artificial Sequence
  Synthetic
atggcttcagaaaaagaaattaggagagagagattcttgaacgttttccctaaattagtagaggaattgaacgcatcgcttttggcttacggtatgcctaaggaagcatgtgactggtatgcccactcattgaactacaacactccaggcggtaagctaaatagaggtttgtccgttgtggacacgtatgctattctctccaacaagaccgttgaacaattggggcaagaagaatacgaaaaggttgccattctaggttggtgcattgagttgttgcaggcttactggttggtcgccgatgatatgatggacaagtccattaccagaagaggccaaccatgttggtacaaggttcctgaagttggggaaattgccatctgggacgcattcatgttagaggctgctatctacaagcttttgaaatctcacttcagaaacgaaaaatactacatagatatcaccgaattgttccatgaggtcaccttccaaaccgaattgggccaattgatggacttaatcactgcacctgaagacaaagtcgacttgagtaagttctccctaaagaagcactccttcatagttactttcaagactgcttactattctttctacttgcctgtcgcattggccatgtacgttgccggtatcacggatgaaaaggatttgaaacaagccagagatgtcttgattccattgggtgaatacttccaaattcaagatgactacttagactgcttcggtaccccagaacagatcggtaagatcggtacagatatccaagataacaaatgttcttgggtaatcaacaaggcattggaacttgcttccgcagaacaaagaaagactttagacgaaaattacggtaagaaggactcagtcgcagaagccaaatgcaaaaagattttcaatgacttgaaaattgaacagctataccacgaatatgaagagtctattgccaaggatttgaaggccaaaatttctcaggtcgatgagtctcgtggcttcaaagctgatgtcttaactgcgttcttgaacaaagtttacaagagaagcaaaggcggaggtggttctggtgggggtggttcgggtggtggtgggtcaggtggtggcggtagcggtggcggtggttccggtggtggtggtagtggaggtgggggttctggaggtggtggttctggtggtggaggttcccatcacgaatcagataatagtattgccacaaagatcttaaactttgggcatacatgttggaaattacaaaggccctacgtcgtcaaaggaatgataagcatcgcttgcggtctgttcggaagggaattatttaacaataggcatctattcagctgggggttaatgtggaaagctttcttcgcgttagtgccaatcctaagctttaactttttcgccgccatcatgaaccagatttatgatgttgatatcgacaggataaataagccagatcttccattggtatccggtgaaatgtcaatagaaactgcatggatattatctattatcgttgcgctgaccggactgatagtaacaatcaaattgaaatctgcacccctgtttgtttttatatatatatttggtattttcgctggattcgcttactcagtgccacctatcaggtggaagcagtacccattcacgaattttctgatcacgatctctagccacgtcgggttagcgttcacatcttactctgcaaccacgagtgccttggggcttcctttcgtctggcgtccagcttttagttttatcattgcctttatgaccgtaatgggaatgacgatcgcattcgcaaaggacatttctgacatagagggggatgcaaaatacggtgtctccactgtggcgacaaaattaggagctaggaatatgactttcgtggtgtccggtgtattattactaaattatctggtatctataagtatcggcatcatatggccgcaagtgtttaaatccaacattatgatactgagtcatgctattttggctttttgtctgatttttcagacgcgtgagttggcgcttgcaaactatgcctctgcgcccagcaggcagttttttgaattcatatggttattgtactatgccgagtatttcgtctacgtatttatttaa

SEQ ID NO: 150 - DNA, 2142 bp, Artificial Sequence
  Synthetic
atggcttcagaaaaagaaattaggagagagagattcttgaacgttttccctaaattagtagaggaattgaacgcatcgcttttggcttacggtatgcctaaggaagcatgtgactggtatgcccactcattgaactacaacactccaggcggtaagctaaatagaggtttgtccgttgtggacacgtatgctattctctccaacaagaccgttgaacaattggggcaagaagaatacgaaaaggttgccattctaggttggtgcattgagttgttgcaggcttactggttggtcgccgatgatatgatggacaagtccattaccagaagaggccaaccatgttggtacaaggttcctgaagttggggaaattgccatctgggacgcattcatgttagaggctgctatctacaagcttttgaaatctcacttcagaaacgaaaaatactacatagatatcaccgaattgttccatgaggtcaccttccaaaccgaattgggccaattgatggacttaatcactgcacctgaagacaaagtcgacttgagtaagttctccctaaagaagcactccttcatagttactttcaagactgcttactattctttctacttgcctgtcgcattggccatgtacgttgccggtatcacggatgaaaaggatttgaaacaagccagagatgtcttgattccattgggtgaatacttccaaattcaagatgactacttagactgcttcggtaccccagaacagatcggtaagatcggtacagatatccaagataacaaatgttcttgggtaatcaacaaggcattggaacttgcttccgcagaacaaagaaagactttagacgaaaattacggtaagaaggactcagtcgcagaagccaaatgcaaaaagattttcaatgacttgaaaattgaacagctataccacgaatatgaagagtctattgccaaggatttgaaggccaaaatttctcaggtcgatgagtctcgtggcttcaaagctgatgtcttaactgcgttcttgaacaaagtttacaagagaagcaaaggcggaggtggttctggtgggggtggttcgggtggtggtgggtcaggtggtggcggtagcggtggcggtggttccggtggtggtggtagtggaggtgggggttctggaggtggtggttctggtggtggaggttccattgaaggttccccgcatcacgaatcagataatagtattgccacaaagatcttaaactttgggcatacatgttggaaattacaaaggccctacgtcgtcaaaggaatgataagcatcgcttgcggtctgttcggaagggaattatttaacaataggcatctattcagctgggggttaatgtggaaagctttcttcgcgttagtgccaatcctaagctttaactttttcgccgccatcatgaaccagatttatgatgttgatatcgacaggataaataagccagatcttccattggtatccggtgaaatgtcaatagaaactgcatggatattatctattatcgttgcgctgaccggactgatagtaacaatcaaattgaaatctgcacccctgtttgtttttatatatatatttggtattttcgctggattcgcttactcagtgccacctatcaggtggaagcagtacccattcacgaattttctgatcacgatctctagccacgtcgggttagcgttcacatcttactctgcaaccacgagtgccttggggcttcctttcgtctggcgtccagcttttagttttatcattgcctttatgaccgtaatgggaatgacgatcgcattcgcaaaggacatttctgacatagagggggatgcaaaatacggtgtctccactgtggcgacaaaattaggagctaggaatatgactttcgtggtgtccggtgtattattactaaattatctggtatctataagtatcggcatcatatggccgcaagtgtttaaatccaacattatgatactgagtcatgctattttggctttttgtctgatttttcagacgcgtgagttggcgcttgcaaactatgcctctgcgcccagcaggcagttttttgaattcatatggttattgtactatgccgagtatttcgtctacgtatttatttaa

SEQ ID NO: 151 - DNA, 2052 bp, Artificial Sequence
  Synthetic
atggcttcagaaaaagaaattaggagagagagattcttgaacgttttccctaaattagtagaggaattgaacgcatcgcttttggcttacggtatgcctaaggaagcatgtgactggtatgcccactcattgaactacaacactccaggcggtaagctaaatagaggtttgtccgttgtggacacgtatgctattctctccaacaagaccgttgaacaattggggcaagaagaatacgaaaaggttgccattctaggttggtgcattgagttgttgcaggcttactggttggtcgccgatgatatgatggacaagtccattaccagaagaggccaaccatgttggtacaaggttcctgaagttggggaaattgccatctgggacgcattcatgttagaggctgctatctacaagcttttgaaatctcacttcagaaacgaaaaatactacatagatatcaccgaattgttccatgaggtcaccttccaaaccgaattgggccaattgatggacttaatcactgcacctgaagacaaagtcgacttgagtaagttctccctaaagaagcactccttcatagttactttcaagactgcttactattctttctacttgcctgtcgcattggccatgtacgttgccggtatcacggatgaaaaggatttgaaacaagccagagatgtcttgattccattgggtgaatacttccaaattcaagatgactacttagactgcttcggtaccccagaacagatcggtaagatcggtacagatatccaagataacaaatgttcttgggtaatcaacaaggcattggaacttgcttccgcagaacaaagaaagactttagacgaaaattacggtaagaaggactcagtcgcagaagccaaatgcaaaaagattttcaatgacttgaaaattgaacagctataccacgaatatgaagagtctattgccaaggatttgaaggccaaaatttctcaggtcgatgagtctcgtggcttcaaagctgatgtcttaactgcgttcttgaacaaagtttacaagagaagcaaaggcggaggtggttctggtgggggtggttcgggtggtggtgggtcaattgaaggttccccgcatcacgaatcagataatagtattgccacaaagatcttaaactttgggcatacatgttggaaattacaaaggccctacgtcgtcaaaggaatgataagcatcgcttgcggtctgttcggaagggaattatttaacaataggcatctattcagctgggggttaatgtggaaagctttcttcgcgttagtgccaatcctaagctttaactttttcgccgccatcatgaaccagatttatgatgttgatatcgacaggataaataagccagatcttccattggtatccggtgaaatgtcaatagaaactgcatggatattatctattatcgttgcgctgaccggactgatagtaacaatcaaattgaaatctgcacccctgtttgtttttatatatatatttggtattttcgctggattcgcttactcagtgccacctatcaggtggaagcagtacccattcacgaattttctgatcacgatctctagccacgtcgggttagcgttcacatcttactctgcaaccacgagtgccttggggcttcctttcgtctggcgtccagcttttagttttatcattgcctttatgaccgtaatgggaatgacgatcgcattcgcaaaggacatttctgacatagagggggatgcaaaatacggtgtctccactgtggcgacaaaattaggagctaggaatatgactttcgtggtgtccggtgtattattactaaattatctggtatctataagtatcggcatcatatggccgcaagtgtttaaatccaacattatgatactgagtcatgctattttggctttttgtctgatttttcagacgcgtgagttggcgcttgcaaactatgcctctgcgcccagcaggcagttttttgaattcatatggttattgtactatgccgagtatttcgtctacgtatttatttaa

SEQ ID NO: 152 - DNA, 2067 bp, Artificial Sequence
  Synthetic
atggcttcagaaaaagaaattaggagagagagattcttgaacgttttccctaaattagtagaggaattgaacgcatcgcttttggcttacggtatgcctaaggaagcatgtgactggtatgcccactcattgaactacaacactccaggcggtaagctaaatagaggtttgtccgttgtggacacgtatgctattctctccaacaagaccgttgaacaattggggcaagaagaatacgaaaaggttgccattctaggttggtgcattgagttgttgcaggcttactggttggtcgccgatgatatgatggacaagtccattaccagaagaggccaaccatgttggtacaaggttcctgaagttggggaaattgccatctgggacgcattcatgttagaggctgctatctacaagcttttgaaatctcacttcagaaacgaaaaatactacatagatatcaccgaattgttccatgaggtcaccttccaaaccgaattgggccaattgatggacttaatcactgcacctgaagacaaagtcgacttgagtaagttctccctaaagaagcactccttcatagttactttcaagactgcttactattctttctacttgcctgtcgcattggccatgtacgttgccggtatcacggatgaaaaggatttgaaacaagccagagatgtcttgattccattgggtgaatacttccaaattcaagatgactacttagactgcttcggtaccccagaacagatcggtaagatcggtacagatatccaagataacaaatgttcttgggtaatcaacaaggcattggaacttgcttccgcagaacaaagaaagactttagacgaaaattacggtaagaaggactcagtcgcagaagccaaatgcaaaaagattttcaatgacttgaaaattgaacagctataccacgaatatgaagagtctattgccaaggatttgaaggccaaaatttctcaggtcgatgagtctcgtggcttcaaagctgatgtcttaactgcgttcttgaacaaagtttacaagagaagcaaaggcggaggtggttctggtgggggtggttcgggtggtggtgggtcaggtggtggcggtagcggtggcggtggttcccatcacgaatcagataatagtattgccacaaagatcttaaactttgggcatacatgttggaaattacaaaggccctacgtcgtcaaaggaatgataagcatcgcttgcggtctgttcggaagggaattatttaacaataggcatctattcagctgggggttaatgtggaaagctttcttcgcgttagtgccaatcctaagctttaactttttcgccgccatcatgaaccagatttatgatgttgatatcgacaggataaataagccagatcttccattggtatccggtgaaatgtcaatagaaactgcatggatattatctattatcgttgcgctgaccggactgatagtaacaatcaaattgaaatctgcacccctgtttgtttttatatatatatttggtattttcgctggattcgcttactcagtgccacctatcaggtggaagcagtacccattcacgaattttctgatcacgatctctagccacgtcgggttagcgttcacatcttactctgcaaccacgagtgccttggggcttcctttcgtctggcgtccagcttttagttttatcattgcctttatgaccgtaatgggaatgacgatcgcattcgcaaaggacatttctgacatagagggggatgcaaaatacggtgtctccactgtggcgacaaaattaggagctaggaatatgactttcgtggtgtccggtgtattattactaaattatctggtatctataagtatcggcatcatatggccgcaagtgtttaaatccaacattatgatactgagtcatgctattttggctttttgtctgatttttcagacgcgtgagttggcgcttgcaaactatgcctctgcgcccagcaggcagttttttgaattcatatggttattgtactatgccgagtatttcgtctacgtatttatttaa

SEQ ID NO: 153 - DNA, 2100 bp, Artificial Sequence
  Synthetic
atggcttcagaaaaagaaattaggagagagagattcttgaacgttttccctaaattagtagaggaattgaacgcatcgcttttggcttacggtatgcctaaggaagcatgtgactggtatgcccactcattgaactacaacactccaggcggtaagctaaatagaggtttgtccgttgtggacacgtatgctattctctccaacaagaccgttgaacaattggggcaagaagaatacgaaaaggttgccattctaggttggtgcattgagttgttgcaggcttactggttggtcgccgatgatatgatggacaagtccattaccagaagaggccaaccatgttggtacaaggttcctgaagttggggaaattgccatctgggacgcattcatgttagaggctgctatctacaagcttttgaaatctcacttcagaaacgaaaaatactacatagatatcaccgaattgttccatgaggtcaccttccaaaccgaattgggccaattgatggacttaatcactgcacctgaagacaaagtcgacttgagtaagttctccctaaagaagcactccttcatagttactttcaagactgcttactattctttctacttgcctgtcgcattggccatgtacgttgccggtatcacggatgaaaaggatttgaaacaagccagagatgtcttgattccattgggtgaatacttccaaattcaagatgactacttagactgcttcggtaccccagaacagatcggtaagatcggtacagatatccaagataacaaatgttcttgggtaatcaacaaggcattggaacttgcttccgcagaacaaagaaagactttagacgaaaattacggtaagaaggactcagtcgcagaagccaaatgcaaaaagattttcaatgacttgaaaattgaacagctataccacgaatatgaagagtctattgccaaggatttgaaggccaaaatttctcaggtcgatgagtctcgtggcttcaaagctgatgtcttaactgcgttcttgaacaaagtttacaagagaagcaaaggcggaggtggttctggtgggggtggttcgggtggtggtgggtcaggtggtggcggtagcggtggcggtggttcctctgctggctctgaccaaattgaaggttccccgcatcacgaatcagataatagtattgccacaaagatcttaaactttgggcatacatgttggaaattacaaaggccctacgtcgtcaaaggaatgataagcatcgcttgcggtctgttcggaagggaattatttaacaataggcatctattcagctgggggttaatgtggaaagctttcttcgcgttagtgccaatcctaagctttaactttttcgccgccatcatgaaccagatttatgatgttgatatcgacaggataaataagccagatcttccattggtatccggtgaaatgtcaatagaaactgcatggatattatctattatcgttgcgctgaccggactgatagtaacaatcaaattgaaatctgcacccctgtttgtttttatatatatatttggtattttcgctggattcgcttactcagtgccacctatcaggtggaagcagtacccattcacgaattttctgatcacgatctctagccacgtcgggttagcgttcacatcttactctgcaaccacgagtgccttggggcttcctttcgtctggcgtccagcttttagttttatcattgcctttatgaccgtaatgggaatgacgatcgcattcgcaaaggacatttctgacatagagggggatgcaaaatacggtgtctccactgtggcgacaaaattaggagctaggaatatgactttcgtggtgtccggtgtattattactaaattatctggtatctataagtatcggcatcatatggccgcaagtgtttaaatccaacattatgatactgagtcatgctattttggctttttgtctgatttttcagacgcgtgagttggcgcttgcaaactatgcctctgcgcccagcaggcagttttttgaattcatatggttattgtactatgccgagtatttcgtctacgtatttatttaa

SEQ ID NO: 154 - DNA, 2160 bp, Artificial Sequence
  Synthetic
atggcttcagaaaaagaaattaggagagagagattcttgaacgttttccctaaattagtagaggaattgaacgcatcgcttttggcttacggtatgcctaaggaagcatgtgactggtatgcccactcattgaactacaacactccaggcggtaagctaaatagaggtttgtccgttgtggacacgtatgctattctctccaacaagaccgttgaacaattggggcaagaagaatacgaaaaggttgccattctaggttggtgcattgagttgttgcaggcttactggttggtcgccgatgatatgatggacaagtccattaccagaagaggccaaccatgttggtacaaggttcctgaagttggggaaattgccatctgggacgcattcatgttagaggctgctatctacaagcttttgaaatctcacttcagaaacgaaaaatactacatagatatcaccgaattgttccatgaggtcaccttccaaaccgaattgggccaattgatggacttaatcactgcacctgaagacaaagtcgacttgagtaagttctccctaaagaagcactccttcatagttactttcaagactgcttactattctttctacttgcctgtcgcattggccatgtacgttgccggtatcacggatgaaaaggatttgaaacaagccagagatgtcttgattccattgggtgaatacttccaaattcaagatgactacttagactgcttcggtaccccagaacagatcggtaagatcggtacagatatccaagataacaaatgttcttgggtaatcaacaaggcattggaacttgcttccgcagaacaaagaaagactttagacgaaaattacggtaagaaggactcagtcgcagaagccaaatgcaaaaagattttcaatgacttgaaaattgaacagctataccacgaatatgaagagtctattgccaaggatttgaaggccaaaatttctcaggtcgatgagtctcgtggcttcaaagctgatgtcttaactgcgttcttgaacaaagtttacaagagaagcaaaggcggaggtggttctggtgggggtggttcgggtggtggtgggtcaggtggtggcggtagcggtggcggtggttccggtggtggtggtagtggaggtgggggttctggaggtggtggttctggtggtggaggttcctctgctggctctgaccaaattgaaggttccccgcatcacgaatcagataatagtattgccacaaagatcttaaactttgggcatacatgttggaaattacaaaggccctacgtcgtcaaaggaatgataagcatcgcttgcggtctgttcggaagggaattatttaacaataggcatctattcagctgggggttaatgtggaaagctttcttcgcgttagtgccaatcctaagctttaactttttcgccgccatcatgaaccagatttatgatgttgatatcgacaggataaataagccagatcttccattggtatccggtgaaatgtcaatagaaactgcatggatattatctattatcgttgcgctgaccggactgatagtaacaatcaaattgaaatctgcacccctgtttgtttttatatatatatttggtattttcgctggattcgcttactcagtgccacctatcaggtggaagcagtacccattcacgaattttctgatcacgatctctagccacgtcgggttagcgttcacatcttactctgcaaccacgagtgccttggggcttcctttcgtctggcgtccagcttttagttttatcattgcctttatgaccgtaatgggaatgacgatcgcattcgcaaaggacatttctgacatagagggggatgcaaaatacggtgtctccactgtggcgacaaaattaggagctaggaatatgactttcgtggtgtccggtgtattattactaaattatctggtatctataagtatcggcatcatatggccgcaagtgtttaaatccaacattatgatactgagtcatgctattttggctttttgtctgatttttcagacgcgtgagttggcgcttgcaaactatgcctctgcgcccagcaggcagttttttgaattcatatggttattgtactatgccgagtatttcgtctacgtatttatttaa

SEQ ID NO: 155 - DNA, 2130 bp, Artificial Sequence
  Synthetic
atggcttcagaaaaagaaattaggagagagagattcttgaacgttttccctaaattagtagaggaattgaacgcatcgcttttggcttacggtatgcctaaggaagcatgtgactggtatgcccactcattgaactacaacactccaggcggtaagctaaatagaggtttgtccgttgtggacacgtatgctattctctccaacaagaccgttgaacaattggggcaagaagaatacgaaaaggttgccattctaggttggtgcattgagttgttgcaggcttactggttggtcgccgatgatatgatggacaagtccattaccagaagaggccaaccatgttggtacaaggttcctgaagttggggaaattgccatctgggacgcattcatgttagaggctgctatctacaagcttttgaaatctcacttcagaaacgaaaaatactacatagatatcaccgaattgttccatgaggtcaccttccaaaccgaattgggccaattgatggacttaatcactgcacctgaagacaaagtcgacttgagtaagttctccctaaagaagcactccttcatagttactttcaagactgcttactattctttctacttgcctgtcgcattggccatgtacgttgccggtatcacggatgaaaaggatttgaaacaagccagagatgtcttgattccattgggtgaatacttccaaattcaagatgactacttagactgcttcggtaccccagaacagatcggtaagatcggtacagatatccaagataacaaatgttcttgggtaatcaacaaggcattggaacttgcttccgcagaacaaagaaagactttagacgaaaattacggtaagaaggactcagtcgcagaagccaaatgcaaaaagattttcaatgacttgaaaattgaacagctataccacgaatatgaagagtctattgccaaggatttgaaggccaaaatttctcaggtcgatgagtctcgtggcttcaaagctgatgtcttaactgcgttcttgaacaaagtttacaagagaagcaaaggcggaggtggttctggtgggggtggttcgggtggtggtgggtcaggtggtggcggtagcggtggcggtggttccggtggtggtggtagtggaggtgggggttcttctgctggctctgaccaaattgaaggttccccgcatcacgaatcagataatagtattgccacaaagatcttaaactttgggcatacatgttggaaattacaaaggccctacgtcgtcaaaggaatgataagcatcgcttgcggtctgttcggaagggaattatttaacaataggcatctattcagctgggggttaatgtggaaagctttcttcgcgttagtgccaatcctaagctttaactttttcgccgccatcatgaaccagatttatgatgttgatatcgacaggataaataagccagatcttccattggtatccggtgaaatgtcaatagaaactgcatggatattatctattatcgttgcgctgaccggactgatagtaacaatcaaattgaaatctgcacccctgtttgtttttatatatatatttggtattttcgctggattcgcttactcagtgccacctatcaggtggaagcagtacccattcacgaattttctgatcacgatctctagccacgtcgggttagcgttcacatcttactctgcaaccacgagtgccttggggcttcctttcgtctggcgtccagcttttagttttatcattgcctttatgaccgtaatgggaatgacgatcgcattcgcaaaggacatttctgacatagagggggatgcaaaatacggtgtctccactgtggcgacaaaattaggagctaggaatatgactttcgtggtgtccggtgtattattactaaattatctggtatctataagtatcggcatcatatggccgcaagtgtttaaatccaacattatgatactgagtcatgctattttggctttttgtctgatttttcagacgcgtgagttggcgcttgcaaactatgcctctgcgcccagcaggcagttttttgaattcatatggttattgtactatgccgagtatttcgtctacgtatttatttaa

SEQ ID NO: 156 - protein, 679 aa, Artificial Sequence
  Synthetic
MASEKEIRRERFLNVFPKLVEELNASLLAYGMPKEACDWYAHSLNYNTPGGKLNRGLSVVDTYAILSNKTVEQLGQEEYEKVAILGWCIELLQAYWLVADDMMDKSITRRGQPCWYKVPEVGEIAIWDAFMLEAAIYKLLKSHFRNEKYYIDITELFHEVTFQTELGQLMDLITAPEDKVDLSKFSLKKHSFIVTFKTAYYSFYLPVALAMYVAGITDEKDLKQARDVLIPLGEYFQIQDDYLDCFGTPEQIGKIGTDIQDNKCSWVINKALELASAEQRKTLDENYGKKDSVAEAKCKKIFNDLKIEQLYHEYEESIAKDLKAKISQVDESRGFKADVLTAFLNKVYKRSKGGGGSSAGSDQIEGSPHHESDNSIATKILNFGHTCWKLQRPYVVKGMISIACGLFGRELLHNTNLISWSLMFKAFFALVPILSFNFFAAIMNQIYDVDIDRINKPDLPLVSGEMSIETAWILSIIVALTGLIVTIKMKGGPLFVFIYIFGIFAGFAYSVPPIRWKQYPFTNFLITISSHVGLAFTSYYASRAALGLPFELRPSFSFIIAFMTVMGMTIAFAKDISDIEGDAKYGVSTVATKLGARNMTFVVSGVLLLNYLVSISAGIIWPQAFNSNIMILSHAILAFCLIFQTRELALANYASAPSRQFFEFIWLLYYAEYLVYVFI

SEQ ID NO: 157 - protein, 691 aa, Artificial Sequence
  Synthetic
MASEKEIRRERFLNVFPKLVEELNASLLAYGMPKEACDWYAHSLNYNTPGGKLNRGLSVVDTYAILSNKTVEQLGQEEYEKVAILGWCIELLQAYWLVADDMMDKSITRRGQPCWYKVPEVGEIAIWDAFMLEAAIYKLLKSHFRNEKYYIDITELFHEVTFQTELGQLMDLITAPEDKVDLSKFSLKKHSFIVTFKTAYYSFYLPVALAMYVAGITDEKDLKQARDVLIPLGEYFQIQDDYLDCFGTPEQIGKIGTDIQDNKCSWVINKALELASAEQRKTLDENYGKKDSVAEAKCKKIFNDLKIEQLYHEYEESIAKDLKAKISQVDESRGFKADVLTAFLNKVYKRSKGGGGSGGGGSGGGGSSAGSDQIEGSPHHESDNSIATKILNFGHTCWKLQRPYVVKGMISIACGLFGREKLSDFSPLFFVGMWKAFFALVPILSFNFFAAIMNQIYDVDIDRINKPDLPLVSGEMSIETAWILSIIVALTGLIVTILVGSWPLFVFIYIFGIFAGFAYSVPPIRWKQYPFTNFLITISSHVGLAFTSYSHIQTHVFKRPAVFSRAFSFIIAFMTVMGMTIAFAKDISDIEGDAKYGVSTVATKLGARNMTFVVSGVLLLNYLVSISIGASSGFLWSKNIMILSHAILAFCLIFQTRELALANYASAPSRQFFEFIWLLYYAEYFLIPLVR

SEQ ID NO: 158 - protein, 689 aa, Artificial Sequence
  Synthetic
MASEKEIRRERFLNVFPKLVEELNASLLAYGMPKEACDWYAHSLNYNTPGGKLNRGLSVVDTYAILSNKTVEQLGQEEYEKVAILGWCIELLQAYWLVADDMMDKSITRRGQPCWYKVPEVGEIAIWDAFMLEAAIYKLLKSHFRNEKYYIDITELFHEVTFQTELGQLMDLITAPEDKVDLSKFSLKKHSFIVTFKTAYYSFYLPVALAMYVAGITDEKDLKQARDVLIPLGEYFQIQDDYLDCFGTPEQIGKIGTDIQDNKCSWVINKALELASAEQRKTLDENYGKKDSVAEAKCKKIFNDLKIEQLYHEYEESIAKDLKAKISQVDESRGFKADVLTAFLNKVYKRSKGGGGSGGGGSGGGGSSAGSDQIEGSPHHESDNSIATKILNFGHTCWKLQRPYVVKGMISIACGLFGRELFHNTNLLSWSLMLKAFSSLMVILSFNFFAAIMNQIYDVDIDRINKPDLPLVSGEMSIETAWILSIIVALTGLILTIKLNCGPLFISLYCVSIFAGFAYSVPPIRWKQYPFTNFLITISSHVGVNFTCYYASRAAFGLPFEMSPPFTFILAFMTVMGMTIAFAKDISDIEGDAKYGVSTVATKLGARNMTFVVSGVLLLTYVSAILAAIIWPQAFKSNVMLLSHAILAFCLIFQTRELALANYASAPSRQFFEFIWKLHYAEYLVYVFI

SEQ ID NO: 159 - protein, 677 aa, Artificial Sequence
  Synthetic
MASEKEIRRERFLNVFPKLVEELNASLLAYGMPKEACDWYAHSLNYNTPGGKLNRGLSVVDTYAILSNKTVEQLGQEEYEKVAILGWCIELLQAYWLVADDMMDKSITRRGQPCWYKVPEVGEIAIWDAFMLEAAIYKLLKSHFRNEKYYIDITELFHEVTFQTELGQLMDLITAPEDKVDLSKFSLKKHSFIVTFKTAYYSFYLPVALAMYVAGITDEKDLKQARDVLIPLGEYFQIQDDYLDCFGTPEQIGKIGTDIQDNKCSWVINKALELASAEQRKTLDENYGKKDSVAEAKCKKIFNDLKIEQLYHEYEESIAKDLKAKISQVDESRGFKADVLTAFLNKVYKRSKGSGSAGSDQIEGSPHHESDNSIATKILNFGHTCWKLQRPYVVKGMISIACGLFGKELLHNTNLISWSLMFKAFFALVPILSFNFFAAIMNQIYDVDIDRINKPDLPLVSGEMSIETAWILSIIVALTGLIVTIKMKGGPLFVFIYIFGIFAGFAYSVPPIRWKQYPFTNFLITISSHVGLAFTSYYASRAALGLPFELRPSFSFIIAFMTVMGMTIAFAKDISDIEGDAKYGVSTVATKLGARNMTFVVSGVLLLNYLVSILAGIIWPQAFNSNVMILSHAILAFCLIFQTRELALANYASAPSRQFFEFIWLLYYAEYLVYVFI

SEQ ID NO: 160 - protein, 699 aa, Artificial Sequence
  Synthetic
MASEKEIRRERFLNVFPKLVEELNASLLAYGMPKEACDWYAHSLNYNTPGGKLNRGLSVVDTYAILSNKTVEQLGQEEYEKVAILGWCIELLQAYWLVADDMMDKSITRRGQPCWYKVPEVGEIAIWDAFMLEAAIYKLLKSHFRNEKYYIDITELFHEVTFQTELGQLMDLITAPEDKVDLSKFSLKKHSFIVTFKTAYYSFYLPVALAMYVAGITDEKDLKQARDVLIPLGEYFQIQDDYLDCFGTPEQIGKIGTDIQDNKCSWVINKALELASAEQRKTLDENYGKKDSVAEAKCKKIFNDLKIEQLYHEYEESIAKDLKAKISQVDESRGFKADVLTAFLNKVYKRSKGGGGSGGGGSGGGGSGGGGSGGGGSSAGSDQIEGSPHHESDNSIATKILNFGHTCWKLQRPYVVKGMISIACGLFGRELFHNTNLLSWSLMLKAFSSLMVILSFNFFAAIMNQIYDVDIDRINKPDLPLVSGEMSIETAWILSIIVALTGLILTIKLNCGPLFISLYCVSIFAGFAYSVPPIRWKQYPFTNFLITISSHVGVNFTCYYASRAAFGLPFEMSPPFTFILAFMTVMGMTIAFAKDISDIEGDAKYGVSTVATKLGARNMTFVVSGVLLLTYVSAILAAIIWPQAFKSNVMLLSHAILAFCLIFQTRELALANYASAPSRQFFEFIWKLHYAEYLVYVFI

SEQ ID NO: 161 - protein, 709 aa, Artificial Sequence
  Synthetic
MASEKEIRRERFLNVFPKLVEELNASLLAYGMPKEACDWYAHSLNYNTPGGKLNRGLSVVDTYAILSNKTVEQLGQEEYEKVAILGWCIELLQAYWLVADDMMDKSITRRGQPCWYKVPEVGEIAIWDAFMLEAAIYKLLKSHFRNEKYYIDITELFHEVTFQTELGQLMDLITAPEDKVDLSKFSLKKHSFIVTFKTAYYSFYLPVALAMYVAGITDEKDLKQARDVLIPLGEYFQIQDDYLDCFGTPEQIGKIGTDIQDNKCSWVINKALELASAEQRKTLDENYGKKDSVAEAKCKKIFNDLKIEQLYHEYEESIAKDLKAKISQVDESRGFKADVLTAFLNKVYKRSKGGGGSGGGGSGGGGSGGGGSGGGGSGGGGSGGGGSSAGSDQIEGSPHHESDNSIATKILNFGHTCWKLQRPYVVKGMISIACGLFGRELFHNTNLLSWSLMLKAFFALVPILSFNFFAAIMNQIYDVDIDRINKPDLPLVSGEMSIETAWILSIIVALTGLIVTIKLNCGPLFVFIYIFGIFAGFAYSVPPIRWKQYPFTNFLITISSHVGLAFTSYYASRAAFGLPFEMSPPFSFIIAFMTVMGMTIAFAKDISDIEGDAKYGVSTVATKLGARNMTFVVSGVLLLNYLVSISAAIIWPQAFKSNIMILSHAILAFCLIFQTRELALANYASAPSRQFFEFIWLLYYAEYLVYVFI

SEQ ID NO: 162 - protein, 679 aa, Artificial Sequence
  Synthetic
MASEKEIRRERFLNVFPKLVEELNASLLAYGMPKEACDWYAHSLNYNTPGGKLNRGLSVVDTYAILSNKTVEQLGQEEYEKVAILGWCIELLQAYWLVADDMMDKSITRRGQPCWYKVPEVGEIAIWDAFMLEAAIYKLLKSHFRNEKYYIDITELFHEVTFQTELGQLMDLITAPEDKVDLSKFSLKKHSFIVTFKTAYYSFYLPVALAMYVAGITDEKDLKQARDVLIPLGEYFQIQDDYLDCFGTPEQIGKIGTDIQDNKCSWVINKALELASAEQRKTLDENYGKKDSVAEAKCKKIFNDLKIEQLYHEYEESIAKDLKAKISQVDESRGFKADVLTAFLNKVYKRSKGGGGSSAGSDQIEGSPHHESDNSIATKILNFGHTCWKLQRPYVVKGMISIACGLFGRELFHNTNLLSWSLMLKAFFALVPILSFNFFAAIMNQIYDVDIDRINKPDLPLVSGEMSIETAWILSIIVALTGLIVTIKLNCGPLFVFIYIFGIFAGFAYSVPPIRWKQYPFTNFLITISSHVGLAFTSYYASRAAFGLPFEMSPPFSFIIAFMTVMGMTIAFAKDISDIEGDAKYGVSTVATKLGARNMTFVVSGVLLLNYLVSISAAIIWPQAFKSNIMILSHAILAFCLIFQTRELALANYASAPSRQFFEFIWLLYYAEYLVYVFI

SEQ ID NO: 163 - protein, 689 aa, Artificial Sequence
  Synthetic
MASEKEIRRERFLNVFPKLVEELNASLLAYGMPKEACDWYAHSLNYNTPGGKLNRGLSVVDTYAILSNKTVEQLGQEEYEKVAILGWCIELLQAYWLVADDMMDKSITRRGQPCWYKVPEVGEIAIWDAFMLEAAIYKLLKSHFRNEKYYIDITELFHEVTFQTELGQLMDLITAPEDKVDLSKFSLKKHSFIVTFKTAYYSFYLPVALAMYVAGITDEKDLKQARDVLIPLGEYFQIQDDYLDCFGTPEQIGKIGTDIQDNKCSWVINKALELASAEQRKTLDENYGKKDSVAEAKCKKIFNDLKIEQLYHEYEESIAKDLKAKISQVDESRGFKADVLTAFLNKVYKRSKGGGGSGGGGSGGGGSSAGSDQIEGSPHHESDNSIATKILNFGHTCWKLQRPYVVKGMISIACGLFGRELLHNTNLISWSLMFKAFFALVPILSFNFFAAIMNQIYDVDIDRINKPDLPLVSGEMSIETAWILSIIVALTGLIVTIKMKGGPLFVFIYIFGIFAGFAYSVPPIRWKQYPFTNFLITISSHVGLAFTSYYASRAALGLPFELRPSFSFIIAFMTVMGMTIAFAKDISDIEGDAKYGVSTVATKLGARNMTFVVSGVLLLNYLVSISAGIIWPQAFNSNIMILSHAILAFCLIFQTRELALANYASAPSRQFFEFIWLLYYAEYLVYVFI

SEQ ID NO: 164 - protein, 677 aa, Artificial Sequence
  Synthetic
MASEKEIRRERFLNVFPKLVEELNASLLAYGMPKEACDWYAHSLNYNTPGGKLNRGLSVVDTYAILSNKTVEQLGQEEYEKVAILGWCIELLQAYWLVADDMMDKSITRRGQPCWYKVPEVGEIAIWDAFMLEAAIYKLLKSHFRNEKYYIDITELFHEVTFQTELGQLMDLITAPEDKVDLSKFSLKKHSFIVTFKTAYYSFYLPVALAMYVAGITDEKDLKQARDVLIPLGEYFQIQDDYLDCFGTPEQIGKIGTDIQDNKCSWVINKALELASAEQRKTLDENYGKKDSVAEAKCKKIFNDLKIEQLYHEYEESIAKDLKAKISQVDESRGFKADVLTAFLNKVYKRSKGSGSAGSDQIEGSPHHESDNSIATKILNFGHTCWKLQRPYVVKGMISIACGLFGKELLHNTNLISWSLMFKAFFFLVAILSFNFFAAIMNQIYDVDIDRINKPDLPLVSGEMSIETAWILSIIVALFGLIITIKMKGGPLYIFGYCFGIFAGFAYSVPPIRWKQYPFTNFLITISSHVITNFTFYYASRAALGLPFELRPSFTFLLAFMTVMGMTIAFAKDISDIEGDAKYGVSTVATKLGARNMTFVVSGVLLLSYVAAILAGIIWPQAFNSNVMLLSHAILAFCLIFQTRELALANYASAPSRQFFEFIWKLYYAEYLVYVFI

SEQ ID NO: 165 - protein, 701 aa, Artificial Sequence
  Synthetic
MASEKEIRRERFLNVFPKLVEELNASLLAYGMPKEACDWYAHSLNYNTPGGKLNRGLSVVDTYAILSNKTVEQLGQEEYEKVAILGWCIELLQAYWLVADDMMDKSITRRGQPCWYKVPEVGEIAIWDAFMLEAAIYKLLKSHFRNEKYYIDITELFHEVTFQTELGQLMDLITAPEDKVDLSKFSLKKHSFIVTFKTAYYSFYLPVALAMYVAGITDEKDLKQARDVLIPLGEYFQIQDDYLDCFGTPEQIGKIGTDIQDNKCSWVINKALELASAEQRKTLDENYGKKDSVAEAKCKKIFNDLKIEQLYHEYEESIAKDLKAKISQVDESRGFKADVLTAFLNKVYKRSKGGGGSGGGGSGGGGSGGGGSGGGGSSAGSDQIEGSPHHESDNSIATKILNFGHTCWKLQRPYVVKGMISIACGLFGREKLSDFSPLFFVGMWKAFFALVPILSFNFFAAIMNQIYDVDIDRINKPDLPLVSGEMSIETAWILSIIVALTGLIVTILVGSWPLFVFIYIFGIFAGFAYSVPPIRWKQYPFTNFLITISSHVGLAFTSYSHIQTHVFKRPAVFSRAFSFIIAFMTVMGMTIAFAKDISDIEGDAKYGVSTVATKLGARNMTFVVSGVLLLNYLVSISIGASSGFLWSKNIMILSHAILAFCLIFQTRELALANYASAPSRQFFEFIWLLYYAEYFLIPLVR

SEQ ID NO: 166 - protein, 709 aa, Artificial Sequence
  Synthetic
MASEKEIRRERFLNVFPKLVEELNASLLAYGMPKEACDWYAHSLNYNTPGGKLNRGLSVVDTYAILSNKTVEQLGQEEYEKVAILGWCIELLQAYWLVADDMMDKSITRRGQPCWYKVPEVGEIAIWDAFMLEAAIYKLLKSHFRNEKYYIDITELFHEVTFQTELGQLMDLITAPEDKVDLSKFSLKKHSFIVTFKTAYYSFYLPVALAMYVAGITDEKDLKQARDVLIPLGEYFQIQDDYLDCFGTPEQIGKIGTDIQDNKCSWVINKALELASAEQRKTLDENYGKKDSVAEAKCKKIFNDLKIEQLYHEYEESIAKDLKAKISQVDESRGFKADVLTAFLNKVYKRSKGGGGSGGGGSGGGGSGGGGSGGGGSGGGGSGGGGSSAGSDQIEGSPHHESDNSIATKILNFGHTCWKLQRPYVVKGMISIACGLFGRELLHNTNLISWSLMFKAFFALVPILSFNFFAAIMNQIYDVDIDRINKPDLPLVSGEMSIETAWILSIIVALTGLIVTIKMKGGPLFVFIYIFGIFAGFAYSVPPIRWKQYPFTNFLITISSHVGLAFTSYYASRAALGLPFELRPSFSFIIAFMTVMGMTIAFAKDISDIEGDAKYGVSTVATKLGARNMTFVVSGVLLLNYLVSISAGIIWPQAFNSNIMILSHAILAFCLIFQTRELALANYASAPSRQFFEFIWLLYYAEYLVYVFI

SEQ ID NO: 167 - protein, 709 aa, Artificial Sequence
  Synthetic
MASEKEIRRERFLNVFPKLVEELNASLLAYGMPKEACDWYAHSLNYNTPGGKLNRGLSVVDTYAILSNKTVEQLGQEEYEKVAILGWCIELLQAYWLVADDMMDKSITRRGQPCWYKVPEVGEIAIWDAFMLEAAIYKLLKSHFRNEKYYIDITELFHEVTFQTELGQLMDLITAPEDKVDLSKFSLKKHSFIVTFKTAYYSFYLPVALAMYVAGITDEKDLKQARDVLIPLGEYFQIQDDYLDCFGTPEQIGKIGTDIQDNKCSWVINKALELASAEQRKTLDENYGKKDSVAEAKCKKIFNDLKIEQLYHEYEESIAKDLKAKISQVDESRGFKADVLTAFLNKVYKRSKGGGGSGGGGSGGGGSGGGGSGGGGSGGGGSGGGGSSAGSDQIEGSPHHESDNSIATKILNFGHTCWKLQRPYVVKGMISIACGLFGKELLHNTNLISWSLMFKAFFFLVAILSFNFFAAIMNQIYDVDIDRINKPDLPLVSGEMSIETAWILSIIVALFGLIITIKMKGGPLYIFGYCFGIFAGFAYSVPPIRWKQYPFTNFLITISSHVGTNFTFYYASRAALGLPFELRPSFTFLLAFMTVMGMTIAFAKDISDIEGDAKYGVSTVATKLGARNMTFVVSGVLLLSYVAAILAGIIWPQAFNSNVMLLSHAILAFCLIFQTRELALANYASAPSRQFFEFIWKLYYAEYLVYVFI

SEQ ID NO: 168 - protein, 677 aa, Artificial Sequence
  Synthetic
MASEKEIRRERFLNVFPKLVEELNASLLAYGMPKEACDWYAHSLNYNTPGGKLNRGLSVVDTYAILSNKTVEQLGQEEYEKVAILGWCIELLQAYWLVADDMMDKSITRRGQPCWYKVPEVGEIAIWDAFMLEAAIYKLLKSHFRNEKYYIDITELFHEVTFQTELGQLMDLITAPEDKVDLSKFSLKKHSFIVTFKTAYYSFYLPVALAMYVAGITDEKDLKQARDVLIPLGEYFQIQDDYLDCFGTPEQIGKIGTDIQDNKCSWVINKALELASAEQRKTLDENYGKKDSVAEAKCKKIFNDLKIEQLYHEYEESIAKDLKAKISQVDESRGFKADVLTAFLNKVYKRSKGSGSAGSDQIEGSPHHESDNSIATKILNFGHTCWKLQRPYVVKGMISIACGLFGRELFHNTNLLSWSLMLKAFFALVPILSFNFFAAIMNQIYDVDIDRINKPDLPLVSGEMSIETAWILSIIVALTGLIVTIKLNCGPLFVFIYIFGIFAGFAYSVPPIRWKQYPFTNFLITISSHVGLAFTSYYASRAAFGLPFEMSPPFSFIIAFMTVMGMTIAFAKDISDIEGDAKYGVSTVATKLGARNMTFVVSGVLLLNYLVSISAAIIWPQAFKSNIMILSHAILAFCLIFQTRELALANYASAPSRQFFEFIWLLYYAEYLVYVFI

SEQ ID NO: 169 - protein, 699 aa, Artificial Sequence
  Synthetic
MASEKEIRRERFLNVFPKLVEELNASLLAYGMPKEACDWYAHSLNYNTPGGKLNRGLSVVDTYAILSNKTVEQLGQEEYEKVAILGWCIELLQAYWLVADDMMDKSITRRGQPCWYKVPEVGEIAIWDAFMLEAAIYKLLKSHFRNEKYYIDITELFHEVTFQTELGQLMDLITAPEDKVDLSKFSLKKHSFIVTFKTAYYSFYLPVALAMYVAGITDEKDLKQARDVLIPLGEYFQIQDDYLDCFGTPEQIGKIGTDIQDNKCSWVINKALELASAEQRKTLDENYGKKDSVAEAKCKKIFNDLKIEQLYHEYEESIAKDLKAKISQVDESRGFKADVLTAFLNKVYKRSKGGGGSGGGGSGGGGSGGGGSGGGGSSAGSDQIEGSPHHESDNSIATKILNFGHTCWKLQRPYVVKGMISIACGLFGKELLHNTNLISWSLMFKAFFFLVAILSFNFFAAIMNQIYDVDIDRINKPDLPLVSGEMSIETAWILSIIVALFGLIITIKMKGGPLYIFGYCFGIFAGFAYSVPPIRWKQYPFTNFLITISSHVITNFTFYYASRAALGLPFELRPSFTFLLAFMTVMGMTIAFAKDISDIEGDAKYGVSTVATKLGARNMTFVVSGVLLLSYVAAILAGIIWPQAFNSNVMLLSHAILAFCLIFQTRELALANYASAPSRQFFEFIWKLYYAEYLVYVFI

SEQ ID NO: 170 - protein, 679 aa, Artificial Sequence
  Synthetic
MASEKEIRRERFLNVFPKLVEELNASLLAYGMPKEACDWYAHSLNYNTPGGKLNRGLSVVDTYAILSNKTVEQLGQEEYEKVAILGWCIELLQAYWLVADDMMDKSITRRGQPCWYKVPEVGEIAIWDAFMLEAAIYKLLKSHFRNEKYYIDITELFHEVTFQTELGQLMDLITAPEDKVDLSKFSLKKHSFIVTFKTAYYSFYLPVALAMYVAGITDEKDLKQARDVLIPLGEYFQIQDDYLDCFGTPEQIGKIGTDIQDNKCSWVINKALELASAEQRKTLDENYGKKDSVAEAKCKKIFNDLKIEQLYHEYEESIAKDLKAKISQVDESRGFKADVLTAFLNKVYKRSKGGGGSSAGSDQIEGSPHHESDNSIATKILNFGHTCWKLQRPYVVKGMISIACGLFGKELLHNTNLISWSLMFKAFFALVPILSFNFFAAIMNQIYDVDIDRINKPDLPLVSGEMSIETAWILSIIVALTGLIVTIKMKGGPLFVFIYIFGIFAGFAYSVPPIRWKQYPFTNFLITISSHVGLAFTSYYASRAALGLPFELRPSFSFIIAFMTVMGMTIAFAKDISDIEGDAKYGVSTVATKLGARNMTFVVSGVLLLNYLVSILAGIIWPQAFNSNVMILSHAILAFCLIFQTRELALANYASAPSRQFFEFIWLLYYAEYLVYVFI

SEQ ID NO: 171 - protein, 709 aa, Artificial Sequence
  Synthetic
MASEKEIRRERFLNVFPKLVEELNASLLAYGMPKEACDWYAHSLNYNTPGGKLNRGLSVVDTYAILSNKTVEQLGQEEYEKVAILGWCIELLQAYWLVADDMMDKSITRRGQPCWYKVPEVGEIAIWDAFMLEAAIYKLLKSHFRNEKYYIDITELFHEVTFQTELGQLMDLITAPEDKVDLSKFSLKKHSFIVTFKTAYYSFYLPVALAMYVAGITDEKDLKQARDVLIPLGEYFQIQDDYLDCFGTPEQIGKIGTDIQDNKCSWVINKALELASAEQRKTLDENYGKKDSVAEAKCKKIFNDLKIEQLYHEYEESIAKDLKAKISQVDESRGFKADVLTAFLNKVYKRSKGGGGSGGGGSGGGGSGGGGSGGGGSGGGGSGGGGSSAGSDQIEGSPHHESDNSIATKILNFGHTCWKLQRPYVVKGMISIACGLFGRELFHNTNLLSWSLMLKAFSSLMVILSFNFFAAIMNQIYDVDIDRINKPDLPLVSGEMSIETAWILSIIVALTGLILTIKLNCGPLFISLYCVSIFAGFAYSVPPIRWKQYPFTNFLITISSHVGVNFTCYYASRAAFGLPFEMSPPFTFILAFMTVMGMTIAFAKDISDIEGDAKYGVSTVATKLGARNMTFVVSGVLLLTYVSAILAAIIWPQAFKSNVMLLSHAILAFCLIFQTRELALANYASAPSRQFFEFIWKLHYAEYLVYVFI

SEQ ID NO: 172 - protein, 699 aa, Artificial Sequence
  Synthetic
MASEKEIRRERFLNVFPKLVEELNASLLAYGMPKEACDWYAHSLNYNTPGGKLNRGLSVVDTYAILSNKTVEQLGQEEYEKVAILGWCIELLQAYWLVADDMMDKSITRRGQPCWYKVPEVGEIAIWDAFMLEAAIYKLLKSHFRNEKYYIDITELFHEVTFQTELGQLMDLITAPEDKVDLSKFSLKKHSFIVTFKTAYYSFYLPVALAMYVAGITDEKDLKQARDVLIPLGEYFQIQDDYLDCFGTPEQIGKIGTDIQDNKCSWVINKALELASAEQRKTLDENYGKKDSVAEAKCKKIFNDLKIEQLYHEYEESIAKDLKAKISQVDESRGFKADVLTAFLNKVYKRSKGGGGSGGGGSGGGGSGGGGSGGGGSSAGSDQIEGSPHHESDNSIATKILNFGHTCWKLQRPYVVKGMISIACGLFGRELFHNTNLLSWSLMLKAFFALVPILSFNFFAAIMNQIYDVDIDRINKPDLPLVSGEMSIETAWILSIIVALTGLIVTIKLNCGPLFVFIYIFGIFAGFAYSVPPIRWKQYPFTNFLITISSHVGLAFTSYYASRAAFGLPFEMSPPFSFIIAFMTVMGMTIAFAKDISDIEGDAKYGVSTVATKLGARNMTFVVSGVLLLNYLVSISAAIIWPQAFKSNIMILSHAILAFCLIFQTRELALANYASAPSRQFFEFIWLLYYAEYLVYVFI

SEQ ID NO: 173 - protein, 679 aa, Artificial Sequence
  Synthetic
MASEKEIRRERFLNVFPKLVEELNASLLAYGMPKEACDWYAHSLNYNTPGGKLNRGLSVVDTYAILSNKTVEQLGQEEYEKVAILGWCIELLQAYWLVADDMMDKSITRRGQPCWYKVPEVGEIAIWDAFMLEAAIYKLLKSHFRNEKYYIDITELFHEVTFQTELGQLMDLITAPEDKVDLSKFSLKKHSFIVTFKTAYYSFYLPVALAMYVAGITDEKDLKQARDVLIPLGEYFQIQDDYLDCFGTPEQIGKIGTDIQDNKCSWVINKALELASAEQRKTLDENYGKKDSVAEAKCKKIFNDLKIEQLYHEYEESIAKDLKAKISQVDESRGFKADVLTAFLNKVYKRSKGGGGSSAGSDQIEGSPHHESDNSIATKILNFGHTCWKLQRPYVVKGMISIACGLFGRELFHNTNLLSWSLMLKAFSSLMVILSFNFFAAIMNQIYDVDIDRINKPDLPLVSGEMSIETAWILSIIVALTGLILTIKLNCGPLFISLYCVSIFAGFAYSVPPIRWKQYPFTNFLITISSHVGVNFTCYYASRAAFGLPFEMSPPFTFILAFMTVMGMTIAFAKDISDIEGDAKYGVSTVATKLGARNMTFVVSGVLLLTYVSAILAAIIWPQAFKSNVMLLSHAILAFCLIFQTRELALANYASAPSRQFFEFIWKLHYAEYLVYVFI

SEQ ID NO: 174 - protein, 699 aa, Artificial Sequence
  Synthetic
MASEKEIRRERFLNVFPKLVEELNASLLAYGMPKEACDWYAHSLNYNTPGGKLNRGLSVVDTYAILSNKTVEQLGQEEYEKVAILGWCIELLQAYWLVADDMMDKSITRRGQPCWYKVPEVGEIAIWDAFMLEAAIYKLLKSHFRNEKYYIDITELFHEVTFQTELGQLMDLITAPEDKVDLSKFSLKKHSFIVTFKTAYYSFYLPVALAMYVAGITDEKDLKQARDVLIPLGEYFQIQDDYLDCFGTPEQIGKIGTDIQDNKCSWVINKALELASAEQRKTLDENYGKKDSVAEAKCKKIFNDLKIEQLYHEYEESIAKDLKAKISQVDESRGFKADVLTAFLNKVYKRSKGGGGSGGGGSGGGGSGGGGSGGGGSSAGSDQIEGSPHHESDNSIATKILNFGHTCWKLQRPYVVKGMISIACGLFGRELLHNTNLISWSLMFKAFFALVPILSFNFFAAIMNQIYDVDIDRINKPDLPLVSGEMSIETAWILSIIVALTGLIVTIKMKGGPLFVFIYIFGIFAGFAYSVPPIRWKQYPFTNFLITISSHVGLAFTSYYASRAALGLPFELRPSFSFIIAFMTVMGMTIAFAKDISDIEGDAKYGVSTVATKLGARNMTFVVSGVLLLNYLVSISAGIIWPQAFNSNIMILSHAILAFCLIFQTRELALANYASAPSRQFFEFIWLLYYAEYLVYVFI

SEQ ID NO: 175 - protein, 679 aa, Artificial Sequence
  Synthetic
MASEKEIRRERFLNVFPKLVEELNASLLAYGMPKEACDWYAHSLNYNTPGGKLNRGLSVVDTYAILSNKTVEQLGQEEYEKVAILGWCIELLQAYWLVADDMMDKSITRRGQPCWYKVPEVGEIAIWDAFMLEAAIYKLLKSHFRNEKYYIDITELFHEVTFQTELGQLMDLITAPEDKVDLSKFSLKKHSFIVTFKTAYYSFYLPVALAMYVAGITDEKDLKQARDVLIPLGEYFQIQDDYLDCFGTPEQIGKIGTDIQDNKCSWVINKALELASAEQRKTLDENYGKKDSVAEAKCKKIFNDLKIEQLYHEYEESIAKDLKAKISQVDESRGFKADVLTAFLNKVYKRSKGGGGSSAGSDQIEGSPHHESDNSIATKILNFGHTCWKLQRPYVVKGMISIACGLFGKELLHNTNLISWSLMFKAFFFLVAILSFNFFAAIMNQIYDVDIDRINKPDLPLVSGEMSIETAWILSIIVALFGLIITIKMKGGPLYIFGYCFGIFAGFAYSVPPIRWKQYPFTNFLITISSHVITNFTFYYASRAALGLPFELRPSFTFLLAFMTVMGMTIAFAKDISDIEGDAKYGVSTVATKLGARNMTFVVSGVLLLSYVAAILAGIIWPQAFNSNVMLLSHAILAFCLIFQTRELALANYASAPSRQFFEFIWKLYYAEYLVYVFI

SEQ ID NO: 176 - protein, 689 aa, Artificial Sequence
  Synthetic
MASEKEIRRERFLNVFPKLVEELNASLLAYGMPKEACDWYAHSLNYNTPGGKLNRGLSVVDTYAILSNKTVEQLGQEEYEKVAILGWCIELLQAYWLVADDMMDKSITRRGQPCWYKVPEVGEIAIWDAFMLEAAIYKLLKSHFRNEKYYIDITELFHEVTFQTELGQLMDLITAPEDKVDLSKFSLKKHSFIVTFKTAYYSFYLPVALAMYVAGITDEKDLKQARDVLIPLGEYFQIQDDYLDCFGTPEQIGKIGTDIQDNKCSWVINKALELASAEQRKTLDENYGKKDSVAEAKCKKIFNDLKIEQLYHEYEESIAKDLKAKISQVDESRGFKADVLTAFLNKVYKRSKGGGGSGGGGSGGGGSSAGSDQIEGSPHHESDNSIATKILNFGHTCWKLQRPYVVKGMISIACGLFGKELLHNTNLISWSLMFKAFFALVPILSFNFFAAIMNQIYDVDIDRINKPDLPLVSGEMSIETAWILSIIVALTGLIVTIKMKGGPLFVFIYIFGIFAGFAYSVPPIRWKQYPFTNFLITISSHVGLAFTSYYASRAALGLPFELRPSFSFIIAFMTVMGMTIAFAKDISDIEGDAKYGVSTVATKLGARNMTFVVSGVLLLNYLVSILAGIIWPQAFNSNVMILSHAILAFCLIFQTRELALANYASAPSRQFFEFIWLLYYAEYLVYVFI

SEQ ID NO: 177 - protein, 679 aa, Artificial Sequence
  Synthetic
MASEKEIRRERFLNVFPKLVEELNASLLAYGMPKEACDWYAHSLNYNTPGGKLNRGLSVVDTYAILSNKTVEQLGQEEYEKVAILGWCIELLQAYWLVADDMMDKSITRRGQPCWYKVPEVGEIAIWDAFMLEAAIYKLLKSHFRNEKYYIDITELFHEVTFQTELGQLMDLITAPEDKVDLSKFSLKKHSFIVTFKTAYYSFYLPVALAMYVAGITDEKDLKQARDVLIPLGEYFQIQDDYLDCFGTPEQIGKIGTDIQDNKCSWVINKALELASAEQRKTLDENYGKKDSVAEAKCKKIFNDLKIEQLYHEYEESIAKDLKAKISQVDESRGFKADVLTAFLNKVYKRSKGSGSAGSDQIEGSPHHESDNSIATKILNFGHTCWKLQRPYVVKGMISIACGLFGREKLSDFSPLFFVGMWKAFFALVPILSFNFFAAIMNQIYDVDIDRINKPDLPLVSGEMSIETAWILSIIVALTGLIVTILVGSWPLFVFIYIFGIFAGFAYSVPPIRWKQYPFTNFLITISSHVGLAFTSYSHIQTHVFKRPAVFSRAFSFIIAFMTVMGMTIAFAKDISDIEGDAKYGVSTVATKLGARNMTFVVSGVLLLNYLVSISIGASSGFLWSKNIMILSHAILAFCLIFQTRELALANYASAPSRQFFEFIWLLYYAEYFLIPLVR

SEQ ID NO: 178 - protein, 681 aa, Artificial Sequence
  Synthetic
MASEKEIRRERFLNVFPKLVEELNASLLAYGMPKEACDWYAHSLNYNTPGGKLNRGLSVVDTYAILSNKTVEQLGQEEYEKVAILGWCIELLQAYWLVADDMMDKSITRRGQPCWYKVPEVGEIAIWDAFMLEAAIYKLLKSHFRNEKYYIDITELFHEVTFQTELGQLMDLITAPEDKVDLSKFSLKKHSFIVTFKTAYYSFYLPVALAMYVAGITDEKDLKQARDVLIPLGEYFQIQDDYLDCFGTPEQIGKIGTDIQDNKCSWVINKALELASAEQRKTLDENYGKKDSVAEAKCKKIFNDLKIEQLYHEYEESIAKDLKAKISQVDESRGFKADVLTAFLNKVYKRSKGGGGSSAGSDQIEGSPHHESDNSIATKILNFGHTCWKLQRPYVVKGMISIACGLFGREKLSDFSPLFFVGMWKAFFALVPILSFNFFAAIMNQIYDVDIDRINKPDLPLVSGEMSIETAWILSIIVALTGLIVTILVGSWPLFVFIYIFGIFAGFAYSVPPIRWKQYPFTNFLITISSHVGLAFTSYSHIQTHVFKRPAVFSRAFSFIIAFMTVMGMTIAFAKDISDIEGDAKYGVSTVATKLGARNMTFVVSGVLLLNYLVSISIGASSGFLWSKNIMILSHAILAFCLIFQTRELALANYASAPSRQFFEFIWLLYYAEYFLIPLVR

SEQ ID NO: 179 - protein, 677 aa, Artificial Sequence
  Synthetic
MASEKEIRRERFLNVFPKLVEELNASLLAYGMPKEACDWYAHSLNYNTPGGKLNRGLSVVDTYAILSNKTVEQLGQEEYEKVAILGWCIELLQAYWLVADDMMDKSITRRGQPCWYKVPEVGEIAIWDAFMLEAAIYKLLKSHFRNEKYYIDITELFHEVTFQTELGQLMDLITAPEDKVDLSKFSLKKHSFIVTFKTAYYSFYLPVALAMYVAGITDEKDLKQARDVLIPLGEYFQIQDDYLDCFGTPEQIGKIGTDIQDNKCSWVINKALELASAEQRKTLDENYGKKDSVAEAKCKKIFNDLKIEQLYHEYEESIAKDLKAKISQVDESRGFKADVLTAFLNKVYKRSKGSGSAGSDQIEGSPHHESDNSIATKILNFGHTCWKLQRPYVVKGMISIACGLFGRELFHNTNLLSWSLMLKAFSSLMVILSFNFFAAIMNQIYDVDIDRINKPDLPLVSGEMSIETAWILSIIVALTGLILTIKLNCGPLFISLYCVSIFAGFAYSVPPIRWKQYPFTNFLITISSHVGVNFTCYYASRAAFGLPFEMSPPFTFILAFMTVMGMTIAFAKDISDIEGDAKYGVSTVATKLGARNMTFVVSGVLLLTYVSAILAAIIWPQAFKSNVMLLSHAILAFCLIFQTRELALANYASAPSRQFFEFIWKLHYAEYLVYVFI

SEQ ID NO: 180 - protein, 689 aa, Artificial Sequence
  Synthetic
MASEKEIRRERFLNVFPKLVEELNASLLAYGMPKEACDWYAHSLNYNTPGGKLNRGLSVVDTYAILSNKTVEQLGQEEYEKVAILGWCIELLQAYWLVADDMMDKSITRRGQPCWYKVPEVGEIAIWDAFMLEAAIYKLLKSHFRNEKYYIDITELFHEVTFQTELGQLMDLITAPEDKVDLSKFSLKKHSFIVTFKTAYYSFYLPVALAMYVAGITDEKDLKQARDVLIPLGEYFQIQDDYLDCFGTPEQIGKIGTDIQDNKCSWVINKALELASAEQRKTLDENYGKKDSVAEAKCKKIFNDLKIEQLYHEYEESIAKDLKAKISQVDESRGFKADVLTAFLNKVYKRSKGGGGSGGGGSGGGGSSAGSDQIEGSPHHESDNSIATKILNFGHTCWKLQRPYVVKGMISIACGLFGKELLHNTNLISWSLMFKAFFFLVAILSFNFFAAIMNQIYDVDIDRINKPDLPLVSGEMSIETAWILSIIVALFGLIITIKMKGGPLYIFGYCFGIFAGFAYSVPPIRWKQYPFTNFLITISSHVGTNFTFYYASRAALGLPFELRPSFTFLLAFMTVMGMTIAFAKDISDIEGDAKYGVSTVATKLGARNMTFVVSGVLLLSYVAAILAGIIWPQAFNSNVMLLSHAILAFCLIFQTRELALANYASAPSRQFFEFIWKLYYAEYLVYVFI

SEQ ID NO: 181 - protein, 709 aa, Artificial Sequence
  Synthetic
MASEKEIRRERFLNVFPKLVEELNASLLAYGMPKEACDWYAHSLNYNTPGGKLNRGLSVVDTYAILSNKTVEQLGQEEYEKVAILGWCIELLQAYWLVADDMMDKSITRRGQPCWYKVPEVGEIAIWDAFMLEAAIYKLLKSHFRNEKYYIDITELFHEVTFQTELGQLMDLITAPEDKVDLSKFSLKKHSFIVTFKTAYYSFYLPVALAMYVAGITDEKDLKQARDVLIPLGEYFQIQDDYLDCFGTPEQIGKIGTDIQDNKCSWVINKALELASAEQRKTLDENYGKKDSVAEAKCKKIFNDLKIEQLYHEYEESIAKDLKAKISQVDESRGFKADVLTAFLNKVYKRSKGGGGSGGGGSGGGGSGGGGSGGGGSGGGGSGGGGSSAGSDQIEGSPHHESDNSIATKILNFGHTCWKLQRPYVVKGMISIACGLFGKELLHNTNLISWSLMFKAFFFLVAILSFNFFAAIMNQIYDVDIDRINKPDLPLVSGEMSIETAWILSIIVALFGLIITIKMKGGPLYIFGYCFGIFAGFAYSVPPIRWKQYPFTNFLITISSHVITNFTFYYASRAALGLPFELRPSFTFLLAFMTVMGMTIAFAKDISDIEGDAKYGVSTVATKLGARNMTFVVSGVLLLSYVAAILAGIIWPQAFNSNVMLLSHAILAFCLIFQTRELALANYASAPSRQFFEFIWKLYYAEYLVYVFI

SEQ ID NO: 182 - protein, 679 aa, Artificial Sequence
  Synthetic
MASEKEIRRERFLNVFPKLVEELNASLLAYGMPKEACDWYAHSLNYNTPGGKLNRGLSVVDTYAILSNKTVEQLGQEEYEKVAILGWCIELLQAYWLVADDMMDKSITRRGQPCWYKVPEVGEIAIWDAFMLEAAIYKLLKSHFRNEKYYIDITELFHEVTFQTELGQLMDLITAPEDKVDLSKFSLKKHSFIVTFKTAYYSFYLPVALAMYVAGITDEKDLKQARDVLIPLGEYFQIQDDYLDCFGTPEQIGKIGTDIQDNKCSWVINKALELASAEQRKTLDENYGKKDSVAEAKCKKIFNDLKIEQLYHEYEESIAKDLKAKISQVDESRGFKADVLTAFLNKVYKRSKGGGGSSAGSDQIEGSPHHESDNSIATKILNFGHTCWKLQRPYVVKGMISIACGLFGKELLHNTNLISWSLMFKAFFFLVAILSFNFFAAIMNQIYDVDIDRINKPDLPLVSGEMSIETAWILSIIVALFGLIITIKMKGGPLYIFGYCFGIFAGFAYSVPPIRWKQYPFTNFLITISSHVGTNFTFYYASRAALGLPFELRPSFTFLLAFMTVMGMTIAFAKDISDIEGDAKYGVSTVATKLGARNMTFVVSGVLLLSYVAAILAGIIWPQAFNSNVMLLSHAILAFCLIFQTRELALANYASAPSRQFFEFIWKLYYAEYLVYVFI

SEQ ID NO: 183 - protein, 677 aa, Artificial Sequence
  Synthetic
MASEKEIRRERFLNVFPKLVEELNASLLAYGMPKEACDWYAHSLNYNTPGGKLNRGLSVVDTYAILSNKTVEQLGQEEYEKVAILGWCIELLQAYWLVADDMMDKSITRRGQPCWYKVPEVGEIAIWDAFMLEAAIYKLLKSHFRNEKYYIDITELFHEVTFQTELGQLMDLITAPEDKVDLSKFSLKKHSFIVTFKTAYYSFYLPVALAMYVAGITDEKDLKQARDVLIPLGEYFQIQDDYLDCFGTPEQIGKIGTDIQDNKCSWVINKALELASAEQRKTLDENYGKKDSVAEAKCKKIFNDLKIEQLYHEYEESIAKDLKAKISQVDESRGFKADVLTAFLNKVYKRSKGSGSAGSDQIEGSPHHESDNSIATKILNFGHTCWKLQRPYVVKGMISIACGLFGKELLHNTNLISWSLMFKAFFFLVAILSFNFFAAIMNQIYDVDIDRINKPDLPLVSGEMSIETAWILSIIVALFGLIITIKMKGGPLYIFGYCFGIFAGFAYSVPPIRWKQYPFTNFLITISSHVGTNFTFYYASRAALGLPFELRPSFTFLLAFMTVMGMTIAFAKDISDIEGDAKYGVSTVATKLGARNMTFVVSGVLLLSYVAAILAGIIWPQAFNSNVMLLSHAILAFCLIFQTRELALANYASAPSRQFFEFIWKLYYAEYLVYVFI

SEQ ID NO: 184 - protein, 689 aa, Artificial Sequence
  Synthetic
MASEKEIRRERFLNVFPKLVEELNASLLAYGMPKEACDWYAHSLNYNTPGGKLNRGLSVVDTYAILSNKTVEQLGQEEYEKVAILGWCIELLQAYWLVADDMMDKSITRRGQPCWYKVPEVGEIAIWDAFMLEAAIYKLLKSHFRNEKYYIDITELFHEVTFQTELGQLMDLITAPEDKVDLSKFSLKKHSFIVTFKTAYYSFYLPVALAMYVAGITDEKDLKQARDVLIPLGEYFQIQDDYLDCFGTPEQIGKIGTDIQDNKCSWVINKALELASAEQRKTLDENYGKKDSVAEAKCKKIFNDLKIEQLYHEYEESIAKDLKAKISQVDESRGFKADVLTAFLNKVYKRSKGGGGSGGGGSGGGGSSAGSDQIEGSPHHESDNSIATKILNFGHTCWKLQRPYVVKGMISIACGLFGKELLHNTNLISWSLMFKAFFFLVAILSFNFFAAIMNQIYDVDIDRINKPDLPLVSGEMSIETAWILSIIVALFGLIITIKMKGGPLYIFGYCFGIFAGFAYSVPPIRWKQYPFTNFLITISSHVITNFTFYYASRAALGLPFELRPSFTFLLAFMTVMGMTIAFAKDISDIEGDAKYGVSTVATKLGARNMTFVVSGVLLLSYVAAILAGIIWPQAFNSNVMLLSHAILAFCLIFQTRELALANYASAPSRQFFEFIWKLYYAEYLVYVFI

SEQ ID NO: 185 - protein, 699 aa, Artificial Sequence
  Synthetic
MASEKEIRRERFLNVFPKLVEELNASLLAYGMPKEACDWYAHSLNYNTPGGKLNRGLSVVDTYAILSNKTVEQLGQEEYEKVAILGWCIELLQAYWLVADDMMDKSITRRGQPCWYKVPEVGEIAIWDAFMLEAAIYKLLKSHFRNEKYYIDITELFHEVTFQTELGQLMDLITAPEDKVDLSKFSLKKHSFIVTFKTAYYSFYLPVALAMYVAGITDEKDLKQARDVLIPLGEYFQIQDDYLDCFGTPEQIGKIGTDIQDNKCSWVINKALELASAEQRKTLDENYGKKDSVAEAKCKKIFNDLKIEQLYHEYEESIAKDLKAKISQVDESRGFKADVLTAFLNKVYKRSKGGGGSGGGGSGGGGSGGGGSGGGGSSAGSDQIEGSPHHESDNSIATKILNFGHTCWKLQRPYVVKGMISIACGLFGKELLHNTNLISWSLMFKAFFFLVAILSFNFFAAIMNQIYDVDIDRINKPDLPLVSGEMSIETAWILSIIVALFGLIITIKMKGGPLYIFGYCFGIFAGFAYSVPPIRWKQYPFTNFLITISSHVGTNFTFYYASRAALGLPFELRPSFTFLLAFMTVMGMTIAFAKDISDIEGDAKYGVSTVATKLGARNMTFVVSGVLLLSYVAAILAGIIWPQAFNSNVMLLSHAILAFCLIFQTRELALANYASAPSRQFFEFIWKLYYAEYLVYVFI

SEQ ID NO: 186 - protein, 711 aa, Artificial Sequence
  Synthetic
MASEKEIRRERFLNVFPKLVEELNASLLAYGMPKEACDWYAHSLNYNTPGGKLNRGLSVVDTYAILSNKTVEQLGQEEYEKVAILGWCIELLQAYWLVADDMMDKSITRRGQPCWYKVPEVGEIAIWDAFMLEAAIYKLLKSHFRNEKYYIDITELFHEVTFQTELGQLMDLITAPEDKVDLSKFSLKKHSFIVTFKTAYYSFYLPVALAMYVAGITDEKDLKQARDVLIPLGEYFQIQDDYLDCFGTPEQIGKIGTDIQDNKCSWVINKALELASAEQRKTLDENYGKKDSVAEAKCKKIFNDLKIEQLYHEYEESIAKDLKAKISQVDESRGFKADVLTAFLNKVYKRSKGGGGSGGGGSGGGGSGGGGSGGGGSGGGGSGGGGSSAGSDQIEGSPHHESDNSIATKILNFGHTCWKLQRPYVVKGMISIACGLFGREKLSDFSPLFFVGMWKAFFALVPILSFNFFAAIMNQIYDVDIDRINKPDLPLVSGEMSIETAWILSIIVALTGLIVTILVGSWPLFVFIYIFGIFAGFAYSVPPIRWKQYPFTNFLITISSHVGLAFTSYSHIQTHVFKRPAVFSRAFSFIIAFMTVMGMTIAFAKDISDIEGDAKYGVSTVATKLGARNMTFVVSGVLLLNYLVSISIGASSGFLWSKNIMILSHAILAFCLIFQTRELALANYASAPSRQFFEFIWLLYYAEYFLIPLVR

SEQ ID NO: 187 - protein, 677 aa, Artificial Sequence
  Synthetic
MASEKEIRRERFLNVFPKLVEELNASLLAYGMPKEACDWYAHSLNYNTPGGKLNRGLSVVDTYAILSNKTVEQLGQEEYEKVAILGWCIELLQAYWLVADDMMDKSITRRGQPCWYKVPEVGEIAIWDAFMLEAAIYKLLKSHFRNEKYYIDITELFHEVTFQTELGQLMDLITAPEDKVDLSKFSLKKHSFIVTFKTAYYSFYLPVALAMYVAGITDEKDLKQARDVLIPLGEYFQIQDDYLDCFGTPEQIGKIGTDIQDNKCSWVINKALELASAEQRKTLDENYGKKDSVAEAKCKKIFNDLKIEQLYHEYEESIAKDLKAKISQVDESRGFKADVLTAFLNKVYKRSKGSGSAGSDQIEGSPHHESDNSIATKILNFGHTCWKLQRPYVVKGMISIACGLFGRELLHNTNLISWSLMFKAFFALVPILSFNFFAAIMNQIYDVDIDRINKPDLPLVSGEMSIETAWILSIIVALTGLIVTIKMKGGPLFVFIYIFGIFAGFAYSVPPIRWKQYPFTNFLITISSHVGLAFTSYYASRAALGLPFELRPSFSFIIAFMTVMGMTIAFAKDISDIEGDAKYGVSTVATKLGARNMTFVVSGVLLLNYLVSISAGIIWPQAFNSNIMILSHAILAFCLIFQTRELALANYASAPSRQFFEFIWLLYYAEYLVYVFI

SEQ ID NO: 188 - protein, 709 aa, Artificial Sequence
  Synthetic
MASEKEIRRERFLNVFPKLVEELNASLLAYGMPKEACDWYAHSLNYNTPGGKLNRGLSVVDTYAILSNKTVEQLGQEEYEKVAILGWCIELLQAYWLVADDMMDKSITRRGQPCWYKVPEVGEIAIWDAFMLEAAIYKLLKSHFRNEKYYIDITELFHEVTFQTELGQLMDLITAPEDKVDLSKFSLKKHSFIVTFKTAYYSFYLPVALAMYVAGITDEKDLKQARDVLIPLGEYFQIQDDYLDCFGTPEQIGKIGTDIQDNKCSWVINKALELASAEQRKTLDENYGKKDSVAEAKCKKIFNDLKIEQLYHEYEESIAKDLKAKISQVDESRGFKADVLTAFLNKVYKRSKGGGGSGGGGSGGGGSGGGGSGGGGSGGGGSGGGGSSAGSDQIEGSPHHESDNSIATKILNFGHTCWKLQRPYVVKGMISIACGLFGKELLHNTNLISWSLMFKAFFALVPILSFNFFAAIMNQIYDVDIDRINKPDLPLVSGEMSIETAWILSIIVALTGLIVTIKMKGGPLFVFIYIFGIFAGFAYSVPPIRWKQYPFTNFLITISSHVGLAFTSYYASRAALGLPFELRPSFSFIIAFMTVMGMTIAFAKDISDIEGDAKYGVSTVATKLGARNMTFVVSGVLLLNYLVSILAGIIWPQAFNSNVMILSHAILAFCLIFQTRELALANYASAPSRQFFEFIWLLYYAEYLVYVFI

SEQ ID NO: 189 - protein, 699 aa, Artificial Sequence
  Synthetic
MASEKEIRRERFLNVFPKLVEELNASLLAYGMPKEACDWYAHSLNYNTPGGKLNRGLSVVDTYAILSNKTVEQLGQEEYEKVAILGWCIELLQAYWLVADDMMDKSITRRGQPCWYKVPEVGEIAIWDAFMLEAAIYKLLKSHFRNEKYYIDITELFHEVTFQTELGQLMDLITAPEDKVDLSKFSLKKHSFIVTFKTAYYSFYLPVALAMYVAGITDEKDLKQARDVLIPLGEYFQIQDDYLDCFGTPEQIGKIGTDIQDNKCSWVINKALELASAEQRKTLDENYGKKDSVAEAKCKKIFNDLKIEQLYHEYEESIAKDLKAKISQVDESRGFKADVLTAFLNKVYKRSKGGGGSGGGGSGGGGSGGGGSGGGGSSAGSDQIEGSPHHESDNSIATKILNFGHTCWKLQRPYVVKGMISIACGLFGKELLHNTNLISWSLMFKAFFALVPILSFNFFAAIMNQIYDVDIDRINKPDLPLVSGEMSIETAWILSIIVALTGLIVTIKMKGGPLFVFIYIFGIFAGFAYSVPPIRWKQYPFTNFLITISSHVGLAFTSYYASRAALGLPFELRPSFSFIIAFMTVMGMTIAFAKDISDIEGDAKYGVSTVATKLGARNMTFVVSGVLLLNYLVSILAGIIWPQAFNSNVMILSHAILAFCLIFQTRELALANYASAPSRQFFEFIWLLYYAEYLVYVFI

SEQ ID NO: 190 - protein, 689 aa, Artificial Sequence
  Synthetic
MASEKEIRRERFLNVFPKLVEELNASLLAYGMPKEACDWYAHSLNYNTPGGKLNRGLSVVDTYAILSNKTVEQLGQEEYEKVAILGWCIELLQAYWLVADDMMDKSITRRGQPCWYKVPEVGEIAIWDAFMLEAAIYKLLKSHFRNEKYYIDITELFHEVTFQTELGQLMDLITAPEDKVDLSKFSLKKHSFIVTFKTAYYSFYLPVALAMYVAGITDEKDLKQARDVLIPLGEYFQIQDDYLDCFGTPEQIGKIGTDIQDNKCSWVINKALELASAEQRKTLDENYGKKDSVAEAKCKKIFNDLKIEQLYHEYEESIAKDLKAKISQVDESRGFKADVLTAFLNKVYKRSKGGGGSGGGGSGGGGSSAGSDQIEGSPHHESDNSIATKILNFGHTCWKLQRPYVVKGMISIACGLFGRELFHNTNLLSWSLMLKAFFALVPILSFNFFAAIMNQIYDVDIDRINKPDLPLVSGEMSIETAWILSIIVALTGLIVTIKLNCGPLFVFIYIFGIFAGFAYSVPPIRWKQYPFTNFLITISSHVGLAFTSYYASRAAFGLPFEMSPPFSFIIAFMTVMGMTIAFAKDISDIEGDAKYGVSTVATKLGARNMTFVVSGVLLLNYLVSISAAIIWPQAFKSNIMILSHAILAFCLIFQTRELALANYASAPSRQFFEFIWLLYYAEYLVYVFI

SEQ ID NO: 191 - DNA, 2037 bp, Artificial Sequence
  Synthetic
atggcttcagaaaaagaaattaggagagagagattcttgaacgttttccctaaattagtagaggaattgaacgcatcgcttttggcttacggtatgcctaaggaagcatgtgactggtatgcccactcattgaactacaacactccaggcggtaagctaaatagaggtttgtccgttgtggacacgtatgctattctctccaacaagaccgttgaacaattggggcaagaagaatacgaaaaggttgccattctaggttggtgcattgagttgttgcaggcttactggttggtcgccgatgatatgatggacaagtccattaccagaagaggccaaccatgttggtacaaggttcctgaagttggggaaattgccatctgggacgcattcatgttagaggctgctatctacaagcttttgaaatctcacttcagaaacgaaaaatactacatagatatcaccgaattgttccatgaggtcaccttccaaaccgaattgggccaattgatggacttaatcactgcacctgaagacaaagtcgacttgagtaagttctccctaaagaagcactccttcatagttactttcaagactgcttactattctttctacttgcctgtcgcattggccatgtacgttgccggtatcacggatgaaaaggatttgaaacaagccagagatgtcttgattccattgggtgaatacttccaaattcaagatgactacttagactgcttcggtaccccagaacagatcggtaagatcggtacagatatccaagataacaaatgttcttgggtaatcaacaaggcattggaacttgcttccgcagaacaaagaaagactttagacgaaaattacggtaagaaggactcagtcgcagaagccaaatgcaaaaagattttcaatgacttgaaaattgaacagctataccacgaatatgaagagtctattgccaaggatttgaaggccaaaatttctcaggtcgatgagtctcgtggcttcaaagctgatgtcttaactgcgttcttgaacaaagtttacaagagaagcaaaggcggaggtggttcttctgcaggaagtgatcagatagaaggcagcccccaccatgagtccgacaattcgatcgccacaaagattttaaactttggtcatacctgttggaaacttcaaaggccttacgtcgttaaagggatgatttctatcgcgtgcggtctattcggtcgcgaactgttgcacaatacgaacttaatatcatggagtctcatgtttaaggctttctttgctttggtaccaattctgtcattcaatttttttgcagccataatgaaccaaatttatgatgtggacatcgatagaattaataaaccggatttacctttggtttctggggagatgtcaatagaaactgcttggatactatccattatcgtggcactaacaggccttattgttactattaaaatgaagggtggaccactttttgtattcatatatatcttcggtatttttgcgggcttcgcttactcggtcccaccgatcagatggaaacagtatccttttacgaacttcttaatcactatttcatcgcatgttggattagcttttacctcttattacgccagtcgtgcagctttgggtttgccatttgaattgcggccaagcttcagcttcatcatagcctttatgacagttatgggtatgactattgcatttgcgaaagacatatccgatattgaaggcgacgccaagtatggtgtgtctaccgtagcaacaaagctgggggctcgaaatatgacttttgtcgtcagtggagttctgttgttaaactaccttgtatcaattagtgctggcattatatggccacaagcatttaattctaatattatgatcctgtcacacgctattttagcgttctgtttgatctttcaaacaagggagcttgcattggcgaattatgcttctgcaccctccaggcagttctttgaatttatatggttactgtattacgcagagtacctagtgtatgttttcatt

SEQ ID NO: 192 - DNA, 2073 bp, Artificial Sequence
  Synthetic
atggcttcagaaaaagaaattaggagagagagattcttgaacgttttccctaaattagtagaggaattgaacgcatcgcttttggcttacggtatgcctaaggaagcatgtgactggtatgcccactcattgaactacaacactccaggcggtaagctaaatagaggtttgtccgttgtggacacgtatgctattctctccaacaagaccgttgaacaattggggcaagaagaatacgaaaaggttgccattctaggttggtgcattgagttgttgcaggcttactggttggtcgccgatgatatgatggacaagtccattaccagaagaggccaaccatgttggtacaaggttcctgaagttggggaaattgccatctgggacgcattcatgttagaggctgctatctacaagcttttgaaatctcacttcagaaacgaaaaatactacatagatatcaccgaattgttccatgaggtcaccttccaaaccgaattgggccaattgatggacttaatcactgcacctgaagacaaagtcgacttgagtaagttctccctaaagaagcactccttcatagttactttcaagactgcttactattctttctacttgcctgtcgcattggccatgtacgttgccggtatcacggatgaaaaggatttgaaacaagccagagatgtcttgattccattgggtgaatacttccaaattcaagatgactacttagactgcttcggtaccccagaacagatcggtaagatcggtacagatatccaagataacaaatgttcttgggtaatcaacaaggcattggaacttgcttccgcagaacaaagaaagactttagacgaaaattacggtaagaaggactcagtcgcagaagccaaatgcaaaaagattttcaatgacttgaaaattgaacagctataccacgaatatgaagagtctattgccaaggatttgaaggccaaaatttctcaggtcgatgagtctcgtggcttcaaagctgatgtcttaactgcgttcttgaacaaagtttacaagagaagcaaaggcggaggtggttctggtgggggtggttcgggtggtggtgggtcatcagctggttccgaccaaattgaagggagcccgcatcacgagagtgataactctatcgcaacaaagatattgaatttcggccatacttgctggaaactgcagaggccatatgtagtgaaaggaatgatttctatcgcctgtggtctttttggtcgtgaaaaactatcagatttttctcctttattctttgttgggatgtggaaggcgtttttcgctttagttccaattttgagttttaatttctttgcagctataatgaaccaaatttacgacgtcgatatagatcgcatcaataagcccgacttacctctcgtttcgggagaaatgtcaatagagactgcctggatcctttccattattgtagcattgaccggtctgatagtgacgattttggtcggctcttggccattgttcgtttttatctatatattcggaatttttgcaggctttgcttactccgttccgcctatccgatggaaacaatatccatttacaaacttcctaattaccatctcaagccacgtcggtttagctttcactagctatagtcatattcagacacacgtatttaaaagaccagcagtattttcgagagccttcagtttcatcatagcttttatgacagtgatgggtatgactattgcctttgccaaggatatttctgatatagaaggagatgcgaaatacggggttagtaccgtcgctacgaagttaggtgcgagaaatatgacgtttgtggttagcggtgtactcttattgaactatctggtgtctatttctattggtgctagctcagggttcctttggagcaaaaatataatgatcttatcacatgcaattctcgctttctgtcttatattccaaactagggaactagccttggcaaactacgcatccgctccctctaggcagttttttgaatttatttggttgttatactatgctgaatatttcctaattccactagttaga

SEQ ID NO: 193 - DNA, 2067 bp, Artificial Sequence
  Synthetic
atggcttcagaaaaagaaattaggagagagagattcttgaacgttttccctaaattagtagaggaattgaacgcatcgcttttggcttacggtatgcctaaggaagcatgtgactggtatgcccactcattgaactacaacactccaggcggtaagctaaatagaggtttgtccgttgtggacacgtatgctattctctccaacaagaccgttgaacaattggggcaagaagaatacgaaaaggttgccattctaggttggtgcattgagttgttgcaggcttactggttggtcgccgatgatatgatggacaagtccattaccagaagaggccaaccatgttggtacaaggttcctgaagttggggaaattgccatctgggacgcattcatgttagaggctgctatctacaagcttttgaaatctcacttcagaaacgaaaaatactacatagatatcaccgaattgttccatgaggtcaccttccaaaccgaattgggccaattgatggacttaatcactgcacctgaagacaaagtcgacttgagtaagttctccctaaagaagcactccttcatagttactttcaagactgcttactattctttctacttgcctgtcgcattggccatgtacgttgccggtatcacggatgaaaaggatttgaaacaagccagagatgtcttgattccattgggtgaatacttccaaattcaagatgactacttagactgcttcggtaccccagaacagatcggtaagatcggtacagatatccaagataacaaatgttcttgggtaatcaacaaggcattggaacttgcttccgcagaacaaagaaagactttagacgaaaattacggtaagaaggactcagtcgcagaagccaaatgcaaaaagattttcaatgacttgaaaattgaacagctataccacgaatatgaagagtctattgccaaggatttgaaggccaaaatttctcaggtcgatgagtctcgtggcttcaaagctgatgtcttaactgcgttcttgaacaaagtttacaagagaagcaaaggcggaggtggttctggtgggggtggttcgggtggtggtgggtcatcagccgggagcgaccagatagaaggaagtcctcatcacgagtctgataactccattgcgacaaaaatcctgaatttcggtcatacgtgctggaagttacaaaggccctatgtcgtgaaaggtatgatttcgatagcttgtggcttgtttggtcgcgaactatttcataataccaaccttttatcttggtcattgatgctcaaggcattctcatccttaatggtaatcctttcttttaatttctttgctgccataatgaatcaaatttacgatgttgatattgaccgaattaacaaaccagatttgccactcgttagtggagagatgagtatcgaaactgcatggatactatcgatcattgtcgctctgacaggcttaatattgactattaagcttaattgtggtccgctatttatatcattgtattgcgtatctattttcgctggatttgcatacagcgttcctccaattcgttggaaacagtatcctttcaccaacttcttaataactatcagctcacacgtgggtgttaactttacatgttattacgcctccagagcagcctttggcttacccttcgaaatgtctccgccatttacttttattctcgcttttatgaccgtaatgggaatgacaatagctttcgcgaaagacatttcagatatcgaaggtgatgcgaaatatggggtgtctactgttgctacgaagttaggtgcaagaaatatgacgtttgttgtcagtggtgtcttgttgctgacatacgtaagcgctatacttgcagctatcatttggccgcaagcctttaagtcaaatgtgatgttgttatctcatgccatcctggcgttctgcctaattttccaaactagagagctagcgcttgcaaattatgcttctgcacctagtaggcagttttttgaatttatctggaaattgcattatgcagagtacttagtttatgttttcatc

SEQ ID NO: 194 - DNA, 2031 bp, Artificial Sequence
  Synthetic
atggcttcagaaaaagaaattaggagagagagattcttgaacgttttccctaaattagtagaggaattgaacgcatcgcttttggcttacggtatgcctaaggaagcatgtgactggtatgcccactcattgaactacaacactccaggcggtaagctaaatagaggtttgtccgttgtggacacgtatgctattctctccaacaagaccgttgaacaattggggcaagaagaatacgaaaaggttgccattctaggttggtgcattgagttgttgcaggcttactggttggtcgccgatgatatgatggacaagtccattaccagaagaggccaaccatgttggtacaaggttcctgaagttggggaaattgccatctgggacgcattcatgttagaggctgctatctacaagcttttgaaatctcacttcagaaacgaaaaatactacatagatatcaccgaattgttccatgaggtcaccttccaaaccgaattgggccaattgatggacttaatcactgcacctgaagacaaagtcgacttgagtaagttctccctaaagaagcactccttcatagttactttcaagactgcttactattctttctacttgcctgtcgcattggccatgtacgttgccggtatcacggatgaaaaggatttgaaacaagccagagatgtcttgattccattgggtgaatacttccaaattcaagatgactacttagactgcttcggtaccccagaacagatcggtaagatcggtacagatatccaagataacaaatgttcttgggtaatcaacaaggcattggaacttgcttccgcagaacaaagaaagactttagacgaaaattacggtaagaaggactcagtcgcagaagccaaatgcaaaaagattttcaatgacttgaaaattgaacagctataccacgaatatgaagagtctattgccaaggatttgaaggccaaaatttctcaggtcgatgagtctcgtggcttcaaagctgatgtcttaactgcgttcttgaacaaagtttacaagagaagcaaaggttctggatccgcaggatcagatcaaatagaagggagcccccatcacgagtcggacaacagtatcgcgacaaaaattcttaattttggccatacttgttggaagttacagcgtccttacgtagttaaaggtatgatttctatcgcttgcggtttgttcggtaaggaactactccacaatacgaacttgatatcatggtctttaatgtttaaagccttctttgctctggtcccaattctaagtttcaattttttcgcagccattatgaatcaaatctatgatgttgacatagataggattaacaagccggatttaccactcgtgtccggagaaatgtctatagagacagcttggatcctgtcgattattgtcgctcttactggcttgatagttaccattaaaatgaaaggtggccctttatttgtgtttatctatatatttggtatattcgcaggttttgcttactctgtacctccaattcgatggaagcagtatccgttcactaactttttgatcaccatttcaagccatgttggactagccttcacatcctactatgcttctagagccgcgcttggtctaccatttgaactgcgcccctcatttagttttataattgcattcatgacagttatggggatgactattgcctttgcaaaggacatttcagatattgaaggagatgcaaaatatggtgtctctacggtagctactaaattaggtgctagaaatatgaccttcgttgtgtcgggggtgttgctattaaattacttagtcagtattttggcaggaataatctggccccaagcttttaattcaaatgtcatgatcttatcgcacgcaattttggccttctgtctcatctttcaaacgagagaattagcccttgctaactacgcaagtgctccttcccgtcaatttttcgagtttatttggttgctgtattatgcggaatacctggtatacgttttcatt

SEQ ID NO: 195 - DNA, 2097 bp, Artificial Sequence
  Synthetic
atggcttcagaaaaagaaattaggagagagagattcttgaacgttttccctaaattagtagaggaattgaacgcatcgcttttggcttacggtatgcctaaggaagcatgtgactggtatgcccactcattgaactacaacactccaggcggtaagctaaatagaggtttgtccgttgtggacacgtatgctattctctccaacaagaccgttgaacaattggggcaagaagaatacgaaaaggttgccattctaggttggtgcattgagttgttgcaggcttactggttggtcgccgatgatatgatggacaagtccattaccagaagaggccaaccatgttggtacaaggttcctgaagttggggaaattgccatctgggacgcattcatgttagaggctgctatctacaagcttttgaaatctcacttcagaaacgaaaaatactacatagatatcaccgaattgttccatgaggtcaccttccaaaccgaattgggccaattgatggacttaatcactgcacctgaagacaaagtcgacttgagtaagttctccctaaagaagcactccttcatagttactttcaagactgcttactattctttctacttgcctgtcgcattggccatgtacgttgccggtatcacggatgaaaaggatttgaaacaagccagagatgtcttgattccattgggtgaatacttccaaattcaagatgactacttagactgcttcggtaccccagaacagatcggtaagatcggtacagatatccaagataacaaatgttcttgggtaatcaacaaggcattggaacttgcttccgcagaacaaagaaagactttagacgaaaattacggtaagaaggactcagtcgcagaagccaaatgcaaaaagattttcaatgacttgaaaattgaacagctataccacgaatatgaagagtctattgccaaggatttgaaggccaaaatttctcaggtcgatgagtctcgtggcttcaaagctgatgtcttaactgcgttcttgaacaaagtttacaagagaagcaaaggcggaggtggttctggtgggggtggttcgggtggtggtgggtcaggtggtggcggtagcggtggcggtggttcctcagccgggagcgaccagatagaaggaagtcctcatcacgagtctgataactccattgcgacaaaaatcctgaatttcggtcatacgtgctggaagttacaaaggccctatgtcgtgaaaggtatgatttcgatagcttgtggcttgtttggtcgcgaactatttcataataccaaccttttatcttggtcattgatgctcaaggcattctcatccttaatggtaatcctttcttttaatttctttgctgccataatgaatcaaatttacgatgttgatattgaccgaattaacaaaccagatttgccactcgttagtggagagatgagtatcgaaactgcatggatactatcgatcattgtcgctctgacaggcttaatattgactattaagcttaattgtggtccgctatttatatcattgtattgcgtatctattttcgctggatttgcatacagcgttcctccaattcgttggaaacagtatcctttcaccaacttcttaataactatcagctcacacgtgggtgttaactttacatgttattacgcctccagagcagcctttggcttacccttcgaaatgtctccgccatttacttttattctcgcttttatgaccgtaatgggaatgacaatagctttcgcgaaagacatttcagatatcgaaggtgatgcgaaatatggggtgtctactgttgctacgaagttaggtgcaagaaatatgacgtttgttgtcagtggtgtcttgttgctgacatacgtaagcgctatacttgcagctatcatttggccgcaagcctttaagtcaaatgtgatgttgttatctcatgccatcctggcgttctgcctaattttccaaactagagagctagcgcttgcaaattatgcttctgcacctagtaggcagttttttgaatttatctggaaattgcattatgcagagtacttagtttatgttttcatc

SEQ ID NO: 196 - DNA, 2127 bp, Artificial Sequence
  Synthetic
atggcttcagaaaaagaaattaggagagagagattcttgaacgttttccctaaattagtagaggaattgaacgcatcgcttttggcttacggtatgcctaaggaagcatgtgactggtatgcccactcattgaactacaacactccaggcggtaagctaaatagaggtttgtccgttgtggacacgtatgctattctctccaacaagaccgttgaacaattggggcaagaagaatacgaaaaggttgccattctaggttggtgcattgagttgttgcaggcttactggttggtcgccgatgatatgatggacaagtccattaccagaagaggccaaccatgttggtacaaggttcctgaagttggggaaattgccatctgggacgcattcatgttagaggctgctatctacaagcttttgaaatctcacttcagaaacgaaaaatactacatagatatcaccgaattgttccatgaggtcaccttccaaaccgaattgggccaattgatggacttaatcactgcacctgaagacaaagtcgacttgagtaagttctccctaaagaagcactccttcatagttactttcaagactgcttactattctttctacttgcctgtcgcattggccatgtacgttgccggtatcacggatgaaaaggatttgaaacaagccagagatgtcttgattccattgggtgaatacttccaaattcaagatgactacttagactgcttcggtaccccagaacagatcggtaagatcggtacagatatccaagataacaaatgttcttgggtaatcaacaaggcattggaacttgcttccgcagaacaaagaaagactttagacgaaaattacggtaagaaggactcagtcgcagaagccaaatgcaaaaagattttcaatgacttgaaaattgaacagctataccacgaatatgaagagtctattgccaaggatttgaaggccaaaatttctcaggtcgatgagtctcgtggcttcaaagctgatgtcttaactgcgttcttgaacaaagtttacaagagaagcaaaggcggaggtggttctggtgggggtggttcgggtggtggtgggtcaggtggtggcggtagcggtggcggtggttccggtggtggtggtagtggaggtgggggttcttctgcgggctcagaccaaatagaaggatccccccatcacgagagtgataacagcatcgctacaaaaattcttaattttgggcatacctgctggaagttgcagcggccatatgtcgtgaaaggtatgatttcaatagcctgtggtctgttcggtagagaactatttcataatactaacttattgtcttggtcgttaatgctcaaggcatttttcgctctagtacctatcttatcattcaattttttcgccgcaattatgaatcaaatatacgatgttgacattgatcgtatcaacaaaccggatttaccactcgtttcgggagaaatgtctattgagactgcttggatattgagtattatcgtagcgttgacgggccttatagttacaattaaattgaattgtggacctttgtttgtctttatctatatcttcggtattttcgccggttttgcttacagtgtgccacctataaggtggaagcaatatccttttacaaactttctaattaccatatcctcgcacgtcggtttagcattcacctcttattacgcctctagagcagcttttggccttccattcgaaatgagccccccgttttccttcattatagcatttatgactgtgatgggtatgacgatcgcgttcgctaaagatatttcagacatagaaggggacgccaagtacggagtttcaactgtagctactaagttgggcgctagaaatatgacatttgttgtatctggtgtcctgttactaaactatttagttagcatttctgcagcaatcatctggcctcaggccttcaaatcgaatattatgattctctctcatgcaattcttgcgttttgcctgatttttcaaactcgcgagctcgccctcgctaattacgcatccgcgccatctcgtcaatttttcgaatttatttggctattgtattatgctgaatatttagtgtacgtctttata

SEQ ID NO: 197 - DNA, 2037 bp, Artificial Sequence
  Synthetic
atggcttcagaaaaagaaattaggagagagagattcttgaacgttttccctaaattagtagaggaattgaacgcatcgcttttggcttacggtatgcctaaggaagcatgtgactggtatgcccactcattgaactacaacactccaggcggtaagctaaatagaggtttgtccgttgtggacacgtatgctattctctccaacaagaccgttgaacaattggggcaagaagaatacgaaaaggttgccattctaggttggtgcattgagttgttgcaggcttactggttggtcgccgatgatatgatggacaagtccattaccagaagaggccaaccatgttggtacaaggttcctgaagttggggaaattgccatctgggacgcattcatgttagaggctgctatctacaagcttttgaaatctcacttcagaaacgaaaaatactacatagatatcaccgaattgttccatgaggtcaccttccaaaccgaattgggccaattgatggacttaatcactgcacctgaagacaaagtcgacttgagtaagttctccctaaagaagcactccttcatagttactttcaagactgcttactattctttctacttgcctgtcgcattggccatgtacgttgccggtatcacggatgaaaaggatttgaaacaagccagagatgtcttgattccattgggtgaatacttccaaattcaagatgactacttagactgcttcggtaccccagaacagatcggtaagatcggtacagatatccaagataacaaatgttcttgggtaatcaacaaggcattggaacttgcttccgcagaacaaagaaagactttagacgaaaattacggtaagaaggactcagtcgcagaagccaaatgcaaaaagattttcaatgacttgaaaattgaacagctataccacgaatatgaagagtctattgccaaggatttgaaggccaaaatttctcaggtcgatgagtctcgtggcttcaaagctgatgtcttaactgcgttcttgaacaaagtttacaagagaagcaaaggcggaggtggttcttctgcgggctcagaccaaatagaaggatccccccatcacgagagtgataacagcatcgctacaaaaattcttaattttgggcatacctgctggaagttgcagcggccatatgtcgtgaaaggtatgatttcaatagcctgtggtctgttcggtagagaactatttcataatactaacttattgtcttggtcgttaatgctcaaggcatttttcgctctagtacctatcttatcattcaattttttcgccgcaattatgaatcaaatatacgatgttgacattgatcgtatcaacaaaccggatttaccactcgtttcgggagaaatgtctattgagactgcttggatattgagtattatcgtagcgttgacgggccttatagttacaattaaattgaattgtggacctttgtttgtctttatctatatcttcggtattttcgccggttttgcttacagtgtgccacctataaggtggaagcaatatccttttacaaactttctaattaccatatcctcgcacgtcggtttagcattcacctcttattacgcctctagagcagcttttggccttccattcgaaatgagccccccgttttccttcattatagcatttatgactgtgatgggtatgacgatcgcgttcgctaaagatatttcagacatagaaggggacgccaagtacggagtttcaactgtagctactaagttgggcgctagaaatatgacatttgttgtatctggtgtcctgttactaaactatttagttagcatttctgcagcaatcatctggcctcaggccttcaaatcgaatattatgattctctctcatgcaattcttgcgttttgcctgatttttcaaactcgcgagctcgccctcgctaattacgcatccgcgccatctcgtcaatttttcgaatttatttggctattgtattatgctgaatatttagtgtacgtctttata

SEQ ID NO: 198 - DNA, 2067 bp, Artificial Sequence
  Synthetic
atggcttcagaaaaagaaattaggagagagagattcttgaacgttttccctaaattagtagaggaattgaacgcatcgcttttggcttacggtatgcctaaggaagcatgtgactggtatgcccactcattgaactacaacactccaggcggtaagctaaatagaggtttgtccgttgtggacacgtatgctattctctccaacaagaccgttgaacaattggggcaagaagaatacgaaaaggttgccattctaggttggtgcattgagttgttgcaggcttactggttggtcgccgatgatatgatggacaagtccattaccagaagaggccaaccatgttggtacaaggttcctgaagttggggaaattgccatctgggacgcattcatgttagaggctgctatctacaagcttttgaaatctcacttcagaaacgaaaaatactacatagatatcaccgaattgttccatgaggtcaccttccaaaccgaattgggccaattgatggacttaatcactgcacctgaagacaaagtcgacttgagtaagttctccctaaagaagcactccttcatagttactttcaagactgcttactattctttctacttgcctgtcgcattggccatgtacgttgccggtatcacggatgaaaaggatttgaaacaagccagagatgtcttgattccattgggtgaatacttccaaattcaagatgactacttagactgcttcggtaccccagaacagatcggtaagatcggtacagatatccaagataacaaatgttcttgggtaatcaacaaggcattggaacttgcttccgcagaacaaagaaagactttagacgaaaattacggtaagaaggactcagtcgcagaagccaaatgcaaaaagattttcaatgacttgaaaattgaacagctataccacgaatatgaagagtctattgccaaggatttgaaggccaaaatttctcaggtcgatgagtctcgtggcttcaaagctgatgtcttaactgcgttcttgaacaaagtttacaagagaagcaaaggcggaggtggttctggtgggggtggttcgggtggtggtgggtcatctgcaggaagtgatcagatagaaggcagcccccaccatgagtccgacaattcgatcgccacaaagattttaaactttggtcatacctgttggaaacttcaaaggccttacgtcgttaaagggatgatttctatcgcgtgcggtctattcggtcgcgaactgttgcacaatacgaacttaatatcatggagtctcatgtttaaggctttctttgctttggtaccaattctgtcattcaatttttttgcagccataatgaaccaaatttatgatgtggacatcgatagaattaataaaccggatttacctttggtttctggggagatgtcaatagaaactgcttggatactatccattatcgtggcactaacaggccttattgttactattaaaatgaagggtggaccactttttgtattcatatatatcttcggtatttttgcgggcttcgcttactcggtcccaccgatcagatggaaacagtatccttttacgaacttcttaatcactatttcatcgcatgttggattagcttttacctcttattacgccagtcgtgcagctttgggtttgccatttgaattgcggccaagcttcagcttcatcatagcctttatgacagttatgggtatgactattgcatttgcgaaagacatatccgatattgaaggcgacgccaagtatggtgtgtctaccgtagcaacaaagctgggggctcgaaatatgacttttgtcgtcagtggagttctgttgttaaactaccttgtatcaattagtgctggcattatatggccacaagcatttaattctaatattatgatcctgtcacacgctattttagcgttctgtttgatctttcaaacaagggagcttgcattggcgaattatgcttctgcaccctccaggcagttctttgaatttatatggttactgtattacgcagagtacctagtgtatgttttcatt

SEQ ID NO: 199 - DNA, 2031 bp, Artificial Sequence
  Synthetic
atggcttcagaaaaagaaattaggagagagagattcttgaacgttttccctaaattagtagaggaattgaacgcatcgcttttggcttacggtatgcctaaggaagcatgtgactggtatgcccactcattgaactacaacactccaggcggtaagctaaatagaggtttgtccgttgtggacacgtatgctattctctccaacaagaccgttgaacaattggggcaagaagaatacgaaaaggttgccattctaggttggtgcattgagttgttgcaggcttactggttggtcgccgatgatatgatggacaagtccattaccagaagaggccaaccatgttggtacaaggttcctgaagttggggaaattgccatctgggacgcattcatgttagaggctgctatctacaagcttttgaaatctcacttcagaaacgaaaaatactacatagatatcaccgaattgttccatgaggtcaccttccaaaccgaattgggccaattgatggacttaatcactgcacctgaagacaaagtcgacttgagtaagttctccctaaagaagcactccttcatagttactttcaagactgcttactattctttctacttgcctgtcgcattggccatgtacgttgccggtatcacggatgaaaaggatttgaaacaagccagagatgtcttgattccattgggtgaatacttccaaattcaagatgactacttagactgcttcggtaccccagaacagatcggtaagatcggtacagatatccaagataacaaatgttcttgggtaatcaacaaggcattggaacttgcttccgcagaacaaagaaagactttagacgaaaattacggtaagaaggactcagtcgcagaagccaaatgcaaaaagattttcaatgacttgaaaattgaacagctataccacgaatatgaagagtctattgccaaggatttgaaggccaaaatttctcaggtcgatgagtctcgtggcttcaaagctgatgtcttaactgcgttcttgaacaaagtttacaagagaagcaaaggttctggatcggcagggtccgaccagattgaaggctctccacaccatgagtcagataatagtatagcgacaaagatcctaaacttcggtcatacttgctggaaattacaacgaccgtatgtagtcaaaggtatgatttccatcgcctgtggactgtttggaaaggaactcttacataataccaaccttataagctggtcattgatgtttaaagctttcttctttctagttgctattttgtcttttaattttttcgcagcaattatgaaccaaatctacgatgtggacatagatagaattaataagcctgatttgcccttagttagtggtgaaatgtctattgaaacggcctggattctaagcataatagtggctctcttcggccttatcataacaatcaaaatgaaaggtggcccattgtatatatttggttactgtttcggaatttttgcaggctttgcttattcggtacctccaattaggtggaagcagtacccctttactaattttctcatcacaattagttctcacgttattaccaacttcactttctattatgcgtcacgtgccgctttaggtcttccttttgagctgcgcccttcttttactttcttgttagcatttatgaccgtcatgggaatgactatcgcatttgctaaagacatttcggatatagagggggatgctaagtacggtgtttccacagtagcgaccaaattaggcgctagaaatatgacgtttgtggtttcaggtgtgttgttacttagctatgtcgccgccattttggccgggataatctggccacaagcattcaacagtaatgtaatgctgttgtcgcatgcaattcttgcgttctgcctgatctttcaaacgagagaattggcgttagctaattacgcatctgctccctcccggcagttttttgaattcatttggaagctctattatgccgaatacttggtctacgttttcatt

SEQ ID NO: 200 - DNA, 2103 bp, Artificial Sequence
  Synthetic
atggcttcagaaaaagaaattaggagagagagattcttgaacgttttccctaaattagtagaggaattgaacgcatcgcttttggcttacggtatgcctaaggaagcatgtgactggtatgcccactcattgaactacaacactccaggcggtaagctaaatagaggtttgtccgttgtggacacgtatgctattctctccaacaagaccgttgaacaattggggcaagaagaatacgaaaaggttgccattctaggttggtgcattgagttgttgcaggcttactggttggtcgccgatgatatgatggacaagtccattaccagaagaggccaaccatgttggtacaaggttcctgaagttggggaaattgccatctgggacgcattcatgttagaggctgctatctacaagcttttgaaatctcacttcagaaacgaaaaatactacatagatatcaccgaattgttccatgaggtcaccttccaaaccgaattgggccaattgatggacttaatcactgcacctgaagacaaagtcgacttgagtaagttctccctaaagaagcactccttcatagttactttcaagactgcttactattctttctacttgcctgtcgcattggccatgtacgttgccggtatcacggatgaaaaggatttgaaacaagccagagatgtcttgattccattgggtgaatacttccaaattcaagatgactacttagactgcttcggtaccccagaacagatcggtaagatcggtacagatatccaagataacaaatgttcttgggtaatcaacaaggcattggaacttgcttccgcagaacaaagaaagactttagacgaaaattacggtaagaaggactcagtcgcagaagccaaatgcaaaaagattttcaatgacttgaaaattgaacagctataccacgaatatgaagagtctattgccaaggatttgaaggccaaaatttctcaggtcgatgagtctcgtggcttcaaagctgatgtcttaactgcgttcttgaacaaagtttacaagagaagcaaaggcggaggtggttctggtgggggtggttcgggtggtggtgggtcaggtggtggcggtagcggtggcggtggttcctcagctggttccgaccaaattgaagggagcccgcatcacgagagtgataactctatcgcaacaaagatattgaatttcggccatacttgctggaaactgcagaggccatatgtagtgaaaggaatgatttctatcgcctgtggtctttttggtcgtgaaaaactatcagatttttctcctttattctttgttgggatgtggaaggcgtttttcgctttagttccaattttgagttttaatttctttgcagctataatgaaccaaatttacgacgtcgatatagatcgcatcaataagcccgacttacctctcgtttcgggagaaatgtcaatagagactgcctggatcctttccattattgtagcattgaccggtctgatagtgacgattttggtcggctcttggccattgttcgtttttatctatatattcggaatttttgcaggctttgcttactccgttccgcctatccgatggaaacaatatccatttacaaacttcctaattaccatctcaagccacgtcggtttagctttcactagctatagtcatattcagacacacgtatttaaaagaccagcagtattttcgagagccttcagtttcatcatagcttttatgacagtgatgggtatgactattgcctttgccaaggatatttctgatatagaaggagatgcgaaatacggggttagtaccgtcgctacgaagttaggtgcgagaaatatgacgtttgtggttagcggtgtactcttattgaactatctggtgtctatttctattggtgctagctcagggttcctttggagcaaaaatataatgatcttatcacatgcaattctcgctttctgtcttatattccaaactagggaactagccttggcaaactacgcatccgctccctctaggcagttttttgaatttatttggttgttatactatgctgaatatttcctaattccactagttaga

SEQ ID NO: 201 - DNA, 2127 bp, Artificial Sequence
  Synthetic
atggcttcagaaaaagaaattaggagagagagattcttgaacgttttccctaaattagtagaggaattgaacgcatcgcttttggcttacggtatgcctaaggaagcatgtgactggtatgcccactcattgaactacaacactccaggcggtaagctaaatagaggtttgtccgttgtggacacgtatgctattctctccaacaagaccgttgaacaattggggcaagaagaatacgaaaaggttgccattctaggttggtgcattgagttgttgcaggcttactggttggtcgccgatgatatgatggacaagtccattaccagaagaggccaaccatgttggtacaaggttcctgaagttggggaaattgccatctgggacgcattcatgttagaggctgctatctacaagcttttgaaatctcacttcagaaacgaaaaatactacatagatatcaccgaattgttccatgaggtcaccttccaaaccgaattgggccaattgatggacttaatcactgcacctgaagacaaagtcgacttgagtaagttctccctaaagaagcactccttcatagttactttcaagactgcttactattctttctacttgcctgtcgcattggccatgtacgttgccggtatcacggatgaaaaggatttgaaacaagccagagatgtcttgattccattgggtgaatacttccaaattcaagatgactacttagactgcttcggtaccccagaacagatcggtaagatcggtacagatatccaagataacaaatgttcttgggtaatcaacaaggcattggaacttgcttccgcagaacaaagaaagactttagacgaaaattacggtaagaaggactcagtcgcagaagccaaatgcaaaaagattttcaatgacttgaaaattgaacagctataccacgaatatgaagagtctattgccaaggatttgaaggccaaaatttctcaggtcgatgagtctcgtggcttcaaagctgatgtcttaactgcgttcttgaacaaagtttacaagagaagcaaaggcggaggtggttctggtgggggtggttcgggtggtggtgggtcaggtggtggcggtagcggtggcggtggttccggtggtggtggtagtggaggtgggggttcttctgcaggaagtgatcagatagaaggcagcccccaccatgagtccgacaattcgatcgccacaaagattttaaactttggtcatacctgttggaaacttcaaaggccttacgtcgttaaagggatgatttctatcgcgtgcggtctattcggtcgcgaactgttgcacaatacgaacttaatatcatggagtctcatgtttaaggctttctttgctttggtaccaattctgtcattcaatttttttgcagccataatgaaccaaatttatgatgtggacatcgatagaattaataaaccggatttacctttggtttctggggagatgtcaatagaaactgcttggatactatccattatcgtggcactaacaggccttattgttactattaaaatgaagggtggaccactttttgtattcatatatatcttcggtatttttgcgggcttcgcttactcggtcccaccgatcagatggaaacagtatccttttacgaacttcttaatcactatttcatcgcatgttggattagcttttacctcttattacgccagtcgtgcagctttgggtttgccatttgaattgcggccaagcttcagcttcatcatagcctttatgacagttatgggtatgactattgcatttgcgaaagacatatccgatattgaaggcgacgccaagtatggtgtgtctaccgtagcaacaaagctgggggctcgaaatatgacttttgtcgtcagtggagttctgttgttaaactaccttgtatcaattagtgctggcattatatggccacaagcatttaattctaatattatgatcctgtcacacgctattttagcgttctgtttgatctttcaaacaagggagcttgcattggcgaattatgcttctgcaccctccaggcagttctttgaatttatatggttactgtattacgcagagtacctagtgtatgttttcatt

SEQ ID NO: 202 - DNA, 2127 bp, Artificial Sequence
  Synthetic
atggcttcagaaaaagaaattaggagagagagattcttgaacgttttccctaaattagtagaggaattgaacgcatcgcttttggcttacggtatgcctaaggaagcatgtgactggtatgcccactcattgaactacaacactccaggcggtaagctaaatagaggtttgtccgttgtggacacgtatgctattctctccaacaagaccgttgaacaattggggcaagaagaatacgaaaaggttgccattctaggttggtgcattgagttgttgcaggcttactggttggtcgccgatgatatgatggacaagtccattaccagaagaggccaaccatgttggtacaaggttcctgaagttggggaaattgccatctgggacgcattcatgttagaggctgctatctacaagcttttgaaatctcacttcagaaacgaaaaatactacatagatatcaccgaattgttccatgaggtcaccttccaaaccgaattgggccaattgatggacttaatcactgcacctgaagacaaagtcgacttgagtaagttctccctaaagaagcactccttcatagttactttcaagactgcttactattctttctacttgcctgtcgcattggccatgtacgttgccggtatcacggatgaaaaggatttgaaacaagccagagatgtcttgattccattgggtgaatacttccaaattcaagatgactacttagactgcttcggtaccccagaacagatcggtaagatcggtacagatatccaagataacaaatgttcttgggtaatcaacaaggcattggaacttgcttccgcagaacaaagaaagactttagacgaaaattacggtaagaaggactcagtcgcagaagccaaatgcaaaaagattttcaatgacttgaaaattgaacagctataccacgaatatgaagagtctattgccaaggatttgaaggccaaaatttctcaggtcgatgagtctcgtggcttcaaagctgatgtcttaactgcgttcttgaacaaagtttacaagagaagcaaaggcggaggtggttctggtgggggtggttcgggtggtggtgggtcaggtggtggcggtagcggtggcggtggttccggtggtggtggtagtggaggtgggggttctagcgccgggtcggatcaaattgaaggtagtccgcatcacgagtcagacaattccatcgcgactaaaattctgaacttcggccatacgtgttggaagctccagaggccttatgtcgtaaaaggtatgatatctattgcatgcggattatttggtaaggaattgctacataataccaaccttatctcttggtcattaatgtttaaagctttctttttcttggttgctatattatcctttaatttctttgcagccattatgaaccaaatatacgatgtggacatcgatcgaattaataagcccgatcttccattggttagtggcgagatgagcatagaaacagcttggattctatctattattgtagcactgtttggactcatcataactattaaaatgaaaggtggtccattgtatattttcgggtactgtttcggtatatttgcaggttttgcttattctgtccctccaatcagatggaagcagtaccctttcacaaactttctgataacaatatcgtcacacgtgggaacgaattttactttttattacgcttcgcgtgccgccttgggcttaccgtttgaattaagaccatccttcaccttcttgttagcttttatgacggttatgggtatgacaattgcgttcgcgaaagacatctcagatatcgaaggcgacgcaaaatatggggttagtactgtcgctaccaagctaggagctagaaatatgacttttgttgtatccggagtcctgttactcagttacgtggcagcgattcttgctggtattatctggccacaagcttttaactctaatgtaatgctattgtcacatgccatattggcgttctgtctgatttttcaaactcgcgaacttgctttagccaactatgcatctgcaccttcaaggcaattcttcgaatttatttggaagctatattatgcagagtaccttgtttacgtgtttatc

SEQ ID NO: 203 - DNA, 2031 bp, Artificial Sequence
  Synthetic
atggcttcagaaaaagaaattaggagagagagattcttgaacgttttccctaaattagtagaggaattgaacgcatcgcttttggcttacggtatgcctaaggaagcatgtgactggtatgcccactcattgaactacaacactccaggcggtaagctaaatagaggtttgtccgttgtggacacgtatgctattctctccaacaagaccgttgaacaattggggcaagaagaatacgaaaaggttgccattctaggttggtgcattgagttgttgcaggcttactggttggtcgccgatgatatgatggacaagtccattaccagaagaggccaaccatgttggtacaaggttcctgaagttggggaaattgccatctgggacgcattcatgttagaggctgctatctacaagcttttgaaatctcacttcagaaacgaaaaatactacatagatatcaccgaattgttccatgaggtcaccttccaaaccgaattgggccaattgatggacttaatcactgcacctgaagacaaagtcgacttgagtaagttctccctaaagaagcactccttcatagttactttcaagactgcttactattctttctacttgcctgtcgcattggccatgtacgttgccggtatcacggatgaaaaggatttgaaacaagccagagatgtcttgattccattgggtgaatacttccaaattcaagatgactacttagactgcttcggtaccccagaacagatcggtaagatcggtacagatatccaagataacaaatgttcttgggtaatcaacaaggcattggaacttgcttccgcagaacaaagaaagactttagacgaaaattacggtaagaaggactcagtcgcagaagccaaatgcaaaaagattttcaatgacttgaaaattgaacagctataccacgaatatgaagagtctattgccaaggatttgaaggccaaaatttctcaggtcgatgagtctcgtggcttcaaagctgatgtcttaactgcgttcttgaacaaagtttacaagagaagcaaaggttctggatctgcgggctcagaccaaatagaaggatccccccatcacgagagtgataacagcatcgctacaaaaattcttaattttgggcatacctgctggaagttgcagcggccatatgtcgtgaaaggtatgatttcaatagcctgtggtctgttcggtagagaactatttcataatactaacttattgtcttggtcgttaatgctcaaggcatttttcgctctagtacctatcttatcattcaattttttcgccgcaattatgaatcaaatatacgatgttgacattgatcgtatcaacaaaccggatttaccactcgtttcgggagaaatgtctattgagactgcttggatattgagtattatcgtagcgttgacgggccttatagttacaattaaattgaattgtggacctttgtttgtctttatctatatcttcggtattttcgccggttttgcttacagtgtgccacctataaggtggaagcaatatccttttacaaactttctaattaccatatcctcgcacgtcggtttagcattcacctcttattacgcctctagagcagcttttggccttccattcgaaatgagccccccgttttccttcattatagcatttatgactgtgatgggtatgacgatcgcgttcgctaaagatatttcagacatagaaggggacgccaagtacggagtttcaactgtagctactaagttgggcgctagaaatatgacatttgttgtatctggtgtcctgttactaaactatttagttagcatttctgcagcaatcatctggcctcaggccttcaaatcgaatattatgattctctctcatgcaattcttgcgttttgcctgatttttcaaactcgcgagctcgccctcgctaattacgcatccgcgccatctcgtcaatttttcgaatttatttggctattgtattatgctgaatatttagtgtacgtctttata

SEQ ID NO: 204 - DNA, 2097 bp, Artificial Sequence
  Synthetic
atggcttcagaaaaagaaattaggagagagagattcttgaacgttttccctaaattagtagaggaattgaacgcatcgcttttggcttacggtatgcctaaggaagcatgtgactggtatgcccactcattgaactacaacactccaggcggtaagctaaatagaggtttgtccgttgtggacacgtatgctattctctccaacaagaccgttgaacaattggggcaagaagaatacgaaaaggttgccattctaggttggtgcattgagttgttgcaggcttactggttggtcgccgatgatatgatggacaagtccattaccagaagaggccaaccatgttggtacaaggttcctgaagttggggaaattgccatctgggacgcattcatgttagaggctgctatctacaagcttttgaaatctcacttcagaaacgaaaaatactacatagatatcaccgaattgttccatgaggtcaccttccaaaccgaattgggccaattgatggacttaatcactgcacctgaagacaaagtcgacttgagtaagttctccctaaagaagcactccttcatagttactttcaagactgcttactattctttctacttgcctgtcgcattggccatgtacgttgccggtatcacggatgaaaaggatttgaaacaagccagagatgtcttgattccattgggtgaatacttccaaattcaagatgactacttagactgcttcggtaccccagaacagatcggtaagatcggtacagatatccaagataacaaatgttcttgggtaatcaacaaggcattggaacttgcttccgcagaacaaagaaagactttagacgaaaattacggtaagaaggactcagtcgcagaagccaaatgcaaaaagattttcaatgacttgaaaattgaacagctataccacgaatatgaagagtctattgccaaggatttgaaggccaaaatttctcaggtcgatgagtctcgtggcttcaaagctgatgtcttaactgcgttcttgaacaaagtttacaagagaagcaaaggcggaggtggttctggtgggggtggttcgggtggtggtgggtcaggtggtggcggtagcggtggcggtggttcctcggcagggtccgaccagattgaaggctctccacaccatgagtcagataatagtatagcgacaaagatcctaaacttcggtcatacttgctggaaattacaacgaccgtatgtagtcaaaggtatgatttccatcgcctgtggactgtttggaaaggaactcttacataataccaaccttataagctggtcattgatgtttaaagctttcttctttctagttgctattttgtcttttaattttttcgcagcaattatgaaccaaatctacgatgtggacatagatagaattaataagcctgatttgcccttagttagtggtgaaatgtctattgaaacggcctggattctaagcataatagtggctctcttcggccttatcataacaatcaaaatgaaaggtggcccattgtatatatttggttactgtttcggaatttttgcaggctttgcttattcggtacctccaattaggtggaagcagtacccctttactaattttctcatcacaattagttctcacgttattaccaacttcactttctattatgcgtcacgtgccgctttaggtcttccttttgagctgcgcccttcttttactttcttgttagcatttatgaccgtcatgggaatgactatcgcatttgctaaagacatttcggatatagagggggatgctaagtacggtgtttccacagtagcgaccaaattaggcgctagaaatatgacgtttgtggtttcaggtgtgttgttacttagctatgtcgccgccattttggccgggataatctggccacaagcattcaacagtaatgtaatgctgttgtcgcatgcaattcttgcgttctgcctgatctttcaaacgagagaattggcgttagctaattacgcatctgctccctcccggcagttttttgaattcatttggaagctctattatgccgaatacttggtctacgttttcatt

SEQ ID NO: 205 - DNA, 2037 bp, Artificial Sequence
  Synthetic
atggcttcagaaaaagaaattaggagagagagattcttgaacgttttccctaaattagtagaggaattgaacgcatcgcttttggcttacggtatgcctaaggaagcatgtgactggtatgcccactcattgaactacaacactccaggcggtaagctaaatagaggtttgtccgttgtggacacgtatgctattctctccaacaagaccgttgaacaattggggcaagaagaatacgaaaaggttgccattctaggttggtgcattgagttgttgcaggcttactggttggtcgccgatgatatgatggacaagtccattaccagaagaggccaaccatgttggtacaaggttcctgaagttggggaaattgccatctgggacgcattcatgttagaggctgctatctacaagcttttgaaatctcacttcagaaacgaaaaatactacatagatatcaccgaattgttccatgaggtcaccttccaaaccgaattgggccaattgatggacttaatcactgcacctgaagacaaagtcgacttgagtaagttctccctaaagaagcactccttcatagttactttcaagactgcttactattctttctacttgcctgtcgcattggccatgtacgttgccggtatcacggatgaaaaggatttgaaacaagccagagatgtcttgattccattgggtgaatacttccaaattcaagatgactacttagactgcttcggtaccccagaacagatcggtaagatcggtacagatatccaagataacaaatgttcttgggtaatcaacaaggcattggaacttgcttccgcagaacaaagaaagactttagacgaaaattacggtaagaaggactcagtcgcagaagccaaatgcaaaaagattttcaatgacttgaaaattgaacagctataccacgaatatgaagagtctattgccaaggatttgaaggccaaaatttctcaggtcgatgagtctcgtggcttcaaagctgatgtcttaactgcgttcttgaacaaagtttacaagagaagcaaaggcggaggtggttcttccgcaggatcagatcaaatagaagggagcccccatcacgagtcggacaacagtatcgcgacaaaaattcttaattttggccatacttgttggaagttacagcgtccttacgtagttaaaggtatgatttctatcgcttgcggtttgttcggtaaggaactactccacaatacgaacttgatatcatggtctttaatgtttaaagccttctttgctctggtcccaattctaagtttcaattttttcgcagccattatgaatcaaatctatgatgttgacatagataggattaacaagccggatttaccactcgtgtccggagaaatgtctatagagacagcttggatcctgtcgattattgtcgctcttactggcttgatagttaccattaaaatgaaaggtggccctttatttgtgtttatctatatatttggtatattcgcaggttttgcttactctgtacctccaattcgatggaagcagtatccgttcactaactttttgatcaccatttcaagccatgttggactagccttcacatcctactatgcttctagagccgcgcttggtctaccatttgaactgcgcccctcatttagttttataattgcattcatgacagttatggggatgactattgcctttgcaaaggacatttcagatattgaaggagatgcaaaatatggtgtctctacggtagctactaaattaggtgctagaaatatgaccttcgttgtgtcgggggtgttgctattaaattacttagtcagtattttggcaggaataatctggccccaagcttttaattcaaatgtcatgatcttatcgcacgcaattttggccttctgtctcatctttcaaacgagagaattagcccttgctaactacgcaagtgctccttcccgtcaatttttcgagtttatttggttgctgtattatgcggaatacctggtatacgttttcatt

SEQ ID NO: 206 - DNA, 2127 bp, Artificial Sequence
  Synthetic
atggcttcagaaaaagaaattaggagagagagattcttgaacgttttccctaaattagtagaggaattgaacgcatcgcttttggcttacggtatgcctaaggaagcatgtgactggtatgcccactcattgaactacaacactccaggcggtaagctaaatagaggtttgtccgttgtggacacgtatgctattctctccaacaagaccgttgaacaattggggcaagaagaatacgaaaaggttgccattctaggttggtgcattgagttgttgcaggcttactggttggtcgccgatgatatgatggacaagtccattaccagaagaggccaaccatgttggtacaaggttcctgaagttggggaaattgccatctgggacgcattcatgttagaggctgctatctacaagcttttgaaatctcacttcagaaacgaaaaatactacatagatatcaccgaattgttccatgaggtcaccttccaaaccgaattgggccaattgatggacttaatcactgcacctgaagacaaagtcgacttgagtaagttctccctaaagaagcactccttcatagttactttcaagactgcttactattctttctacttgcctgtcgcattggccatgtacgttgccggtatcacggatgaaaaggatttgaaacaagccagagatgtcttgattccattgggtgaatacttccaaattcaagatgactacttagactgcttcggtaccccagaacagatcggtaagatcggtacagatatccaagataacaaatgttcttgggtaatcaacaaggcattggaacttgcttccgcagaacaaagaaagactttagacgaaaattacggtaagaaggactcagtcgcagaagccaaatgcaaaaagattttcaatgacttgaaaattgaacagctataccacgaatatgaagagtctattgccaaggatttgaaggccaaaatttctcaggtcgatgagtctcgtggcttcaaagctgatgtcttaactgcgttcttgaacaaagtttacaagagaagcaaaggcggaggtggttctggtgggggtggttcgggtggtggtgggtcaggtggtggcggtagcggtggcggtggttccggtggtggtggtagtggaggtgggggttcttcagccgggagcgaccagatagaaggaagtcctcatcacgagtctgataactccattgcgacaaaaatcctgaatttcggtcatacgtgctggaagttacaaaggccctatgtcgtgaaaggtatgatttcgatagcttgtggcttgtttggtcgcgaactatttcataataccaaccttttatcttggtcattgatgctcaaggcattctcatccttaatggtaatcctttcttttaatttctttgctgccataatgaatcaaatttacgatgttgatattgaccgaattaacaaaccagatttgccactcgttagtggagagatgagtatcgaaactgcatggatactatcgatcattgtcgctctgacaggcttaatattgactattaagcttaattgtggtccgctatttatatcattgtattgcgtatctattttcgctggatttgcatacagcgttcctccaattcgttggaaacagtatcctttcaccaacttcttaataactatcagctcacacgtgggtgttaactttacatgttattacgcctccagagcagcctttggcttacccttcgaaatgtctccgccatttacttttattctcgcttttatgaccgtaatgggaatgacaatagctttcgcgaaagacatttcagatatcgaaggtgatgcgaaatatggggtgtctactgttgctacgaagttaggtgcaagaaatatgacgtttgttgtcagtggtgtcttgttgctgacatacgtaagcgctatacttgcagctatcatttggccgcaagcctttaagtcaaatgtgatgttgttatctcatgccatcctggcgttctgcctaattttccaaactagagagctagcgcttgcaaattatgcttctgcacctagtaggcagttttttgaatttatctggaaattgcattatgcagagtacttagtttatgttttcatc

SEQ ID NO: 207 - DNA, 2097 bp, Artificial Sequence
  Synthetic
atggcttcagaaaaagaaattaggagagagagattcttgaacgttttccctaaattagtagaggaattgaacgcatcgcttttggcttacggtatgcctaaggaagcatgtgactggtatgcccactcattgaactacaacactccaggcggtaagctaaatagaggtttgtccgttgtggacacgtatgctattctctccaacaagaccgttgaacaattggggcaagaagaatacgaaaaggttgccattctaggttggtgcattgagttgttgcaggcttactggttggtcgccgatgatatgatggacaagtccattaccagaagaggccaaccatgttggtacaaggttcctgaagttggggaaattgccatctgggacgcattcatgttagaggctgctatctacaagcttttgaaatctcacttcagaaacgaaaaatactacatagatatcaccgaattgttccatgaggtcaccttccaaaccgaattgggccaattgatggacttaatcactgcacctgaagacaaagtcgacttgagtaagttctccctaaagaagcactccttcatagttactttcaagactgcttactattctttctacttgcctgtcgcattggccatgtacgttgccggtatcacggatgaaaaggatttgaaacaagccagagatgtcttgattccattgggtgaatacttccaaattcaagatgactacttagactgcttcggtaccccagaacagatcggtaagatcggtacagatatccaagataacaaatgttcttgggtaatcaacaaggcattggaacttgcttccgcagaacaaagaaagactttagacgaaaattacggtaagaaggactcagtcgcagaagccaaatgcaaaaagattttcaatgacttgaaaattgaacagctataccacgaatatgaagagtctattgccaaggatttgaaggccaaaatttctcaggtcgatgagtctcgtggcttcaaagctgatgtcttaactgcgttcttgaacaaagtttacaagagaagcaaaggcggaggtggttctggtgggggtggttcgggtggtggtgggtcaggtggtggcggtagcggtggcggtggttcctctgcgggctcagaccaaatagaaggatccccccatcacgagagtgataacagcatcgctacaaaaattcttaattttgggcatacctgctggaagttgcagcggccatatgtcgtgaaaggtatgatttcaatagcctgtggtctgttcggtagagaactatttcataatactaacttattgtcttggtcgttaatgctcaaggcatttttcgctctagtacctatcttatcattcaattttttcgccgcaattatgaatcaaatatacgatgttgacattgatcgtatcaacaaaccggatttaccactcgtttcgggagaaatgtctattgagactgcttggatattgagtattatcgtagcgttgacgggccttatagttacaattaaattgaattgtggacctttgtttgtctttatctatatcttcggtattttcgccggttttgcttacagtgtgccacctataaggtggaagcaatatccttttacaaactttctaattaccatatcctcgcacgtcggtttagcattcacctcttattacgcctctagagcagcttttggccttccattcgaaatgagccccccgttttccttcattatagcatttatgactgtgatgggtatgacgatcgcgttcgctaaagatatttcagacatagaaggggacgccaagtacggagtttcaactgtagctactaagttgggcgctagaaatatgacatttgttgtatctggtgtcctgttactaaactatttagttagcatttctgcagcaatcatctggcctcaggccttcaaatcgaatattatgattctctctcatgcaattcttgcgttttgcctgatttttcaaactcgcgagctcgccctcgctaattacgcatccgcgccatctcgtcaatttttcgaatttatttggctattgtattatgctgaatatttagtgtacgtctttata

SEQ ID NO: 208 - DNA, 2037 bp, Artificial Sequence
  Synthetic
atggcttcagaaaaagaaattaggagagagagattcttgaacgttttccctaaattagtagaggaattgaacgcatcgcttttggcttacggtatgcctaaggaagcatgtgactggtatgcccactcattgaactacaacactccaggcggtaagctaaatagaggtttgtccgttgtggacacgtatgctattctctccaacaagaccgttgaacaattggggcaagaagaatacgaaaaggttgccattctaggttggtgcattgagttgttgcaggcttactggttggtcgccgatgatatgatggacaagtccattaccagaagaggccaaccatgttggtacaaggttcctgaagttggggaaattgccatctgggacgcattcatgttagaggctgctatctacaagcttttgaaatctcacttcagaaacgaaaaatactacatagatatcaccgaattgttccatgaggtcaccttccaaaccgaattgggccaattgatggacttaatcactgcacctgaagacaaagtcgacttgagtaagttctccctaaagaagcactccttcatagttactttcaagactgcttactattctttctacttgcctgtcgcattggccatgtacgttgccggtatcacggatgaaaaggatttgaaacaagccagagatgtcttgattccattgggtgaatacttccaaattcaagatgactacttagactgcttcggtaccccagaacagatcggtaagatcggtacagatatccaagataacaaatgttcttgggtaatcaacaaggcattggaacttgcttccgcagaacaaagaaagactttagacgaaaattacggtaagaaggactcagtcgcagaagccaaatgcaaaaagattttcaatgacttgaaaattgaacagctataccacgaatatgaagagtctattgccaaggatttgaaggccaaaatttctcaggtcgatgagtctcgtggcttcaaagctgatgtcttaactgcgttcttgaacaaagtttacaagagaagcaaaggcggaggtggttcttcagccgggagcgaccagatagaaggaagtcctcatcacgagtctgataactccattgcgacaaaaatcctgaatttcggtcatacgtgctggaagttacaaaggccctatgtcgtgaaaggtatgatttcgatagcttgtggcttgtttggtcgcgaactatttcataataccaaccttttatcttggtcattgatgctcaaggcattctcatccttaatggtaatcctttcttttaatttctttgctgccataatgaatcaaatttacgatgttgatattgaccgaattaacaaaccagatttgccactcgttagtggagagatgagtatcgaaactgcatggatactatcgatcattgtcgctctgacaggcttaatattgactattaagcttaattgtggtccgctatttatatcattgtattgcgtatctattttcgctggatttgcatacagcgttcctccaattcgttggaaacagtatcctttcaccaacttcttaataactatcagctcacacgtgggtgttaactttacatgttattacgcctccagagcagcctttggcttacccttcgaaatgtctccgccatttacttttattctcgcttttatgaccgtaatgggaatgacaatagctttcgcgaaagacatttcagatatcgaaggtgatgcgaaatatggggtgtctactgttgctacgaagttaggtgcaagaaatatgacgtttgttgtcagtggtgtcttgttgctgacatacgtaagcgctatacttgcagctatcatttggccgcaagcctttaagtcaaatgtgatgttgttatctcatgccatcctggcgttctgcctaattttccaaactagagagctagcgcttgcaaattatgcttctgcacctagtaggcagttttttgaatttatctggaaattgcattatgcagagtacttagtttatgttttcatc

SEQ ID NO: 209 - DNA, 2097 bp, Artificial Sequence
  Synthetic
atggcttcagaaaaagaaattaggagagagagattcttgaacgttttccctaaattagtagaggaattgaacgcatcgcttttggcttacggtatgcctaaggaagcatgtgactggtatgcccactcattgaactacaacactccaggcggtaagctaaatagaggtttgtccgttgtggacacgtatgctattctctccaacaagaccgttgaacaattggggcaagaagaatacgaaaaggttgccattctaggttggtgcattgagttgttgcaggcttactggttggtcgccgatgatatgatggacaagtccattaccagaagaggccaaccatgttggtacaaggttcctgaagttggggaaattgccatctgggacgcattcatgttagaggctgctatctacaagcttttgaaatctcacttcagaaacgaaaaatactacatagatatcaccgaattgttccatgaggtcaccttccaaaccgaattgggccaattgatggacttaatcactgcacctgaagacaaagtcgacttgagtaagttctccctaaagaagcactccttcatagttactttcaagactgcttactattctttctacttgcctgtcgcattggccatgtacgttgccggtatcacggatgaaaaggatttgaaacaagccagagatgtcttgattccattgggtgaatacttccaaattcaagatgactacttagactgcttcggtaccccagaacagatcggtaagatcggtacagatatccaagataacaaatgttcttgggtaatcaacaaggcattggaacttgcttccgcagaacaaagaaagactttagacgaaaattacggtaagaaggactcagtcgcagaagccaaatgcaaaaagattttcaatgacttgaaaattgaacagctataccacgaatatgaagagtctattgccaaggatttgaaggccaaaatttctcaggtcgatgagtctcgtggcttcaaagctgatgtcttaactgcgttcttgaacaaagtttacaagagaagcaaaggcggaggtggttctggtgggggtggttcgggtggtggtgggtcaggtggtggcggtagcggtggcggtggttcctctgcaggaagtgatcagatagaaggcagcccccaccatgagtccgacaattcgatcgccacaaagattttaaactttggtcatacctgttggaaacttcaaaggccttacgtcgttaaagggatgatttctatcgcgtgcggtctattcggtcgcgaactgttgcacaatacgaacttaatatcatggagtctcatgtttaaggctttctttgctttggtaccaattctgtcattcaatttttttgcagccataatgaaccaaatttatgatgtggacatcgatagaattaataaaccggatttacctttggtttctggggagatgtcaatagaaactgcttggatactatccattatcgtggcactaacaggccttattgttactattaaaatgaagggtggaccactttttgtattcatatatatcttcggtatttttgcgggcttcgcttactcggtcccaccgatcagatggaaacagtatccttttacgaacttcttaatcactatttcatcgcatgttggattagcttttacctcttattacgccagtcgtgcagctttgggtttgccatttgaattgcggccaagcttcagcttcatcatagcctttatgacagttatgggtatgactattgcatttgcgaaagacatatccgatattgaaggcgacgccaagtatggtgtgtctaccgtagcaacaaagctgggggctcgaaatatgacttttgtcgtcagtggagttctgttgttaaactaccttgtatcaattagtgctggcattatatggccacaagcatttaattctaatattatgatcctgtcacacgctattttagcgttctgtttgatctttcaaacaagggagcttgcattggcgaattatgcttctgcaccctccaggcagttctttgaatttatatggttactgtattacgcagagtacctagtgtatgttttcatt

SEQ ID NO: 210 - DNA, 2037 bp, Artificial Sequence
  Synthetic
atggcttcagaaaaagaaattaggagagagagattcttgaacgttttccctaaattagtagaggaattgaacgcatcgcttttggcttacggtatgcctaaggaagcatgtgactggtatgcccactcattgaactacaacactccaggcggtaagctaaatagaggtttgtccgttgtggacacgtatgctattctctccaacaagaccgttgaacaattggggcaagaagaatacgaaaaggttgccattctaggttggtgcattgagttgttgcaggcttactggttggtcgccgatgatatgatggacaagtccattaccagaagaggccaaccatgttggtacaaggttcctgaagttggggaaattgccatctgggacgcattcatgttagaggctgctatctacaagcttttgaaatctcacttcagaaacgaaaaatactacatagatatcaccgaattgttccatgaggtcaccttccaaaccgaattgggccaattgatggacttaatcactgcacctgaagacaaagtcgacttgagtaagttctccctaaagaagcactccttcatagttactttcaagactgcttactattctttctacttgcctgtcgcattggccatgtacgttgccggtatcacggatgaaaaggatttgaaacaagccagagatgtcttgattccattgggtgaatacttccaaattcaagatgactacttagactgcttcggtaccccagaacagatcggtaagatcggtacagatatccaagataacaaatgttcttgggtaatcaacaaggcattggaacttgcttccgcagaacaaagaaagactttagacgaaaattacggtaagaaggactcagtcgcagaagccaaatgcaaaaagattttcaatgacttgaaaattgaacagctataccacgaatatgaagagtctattgccaaggatttgaaggccaaaatttctcaggtcgatgagtctcgtggcttcaaagctgatgtcttaactgcgttcttgaacaaagtttacaagagaagcaaaggcggaggtggttcttcggcagggtccgaccagattgaaggctctccacaccatgagtcagataatagtatagcgacaaagatcctaaacttcggtcatacttgctggaaattacaacgaccgtatgtagtcaaaggtatgatttccatcgcctgtggactgtttggaaaggaactcttacataataccaaccttataagctggtcattgatgtttaaagctttcttctttctagttgctattttgtcttttaattttttcgcagcaattatgaaccaaatctacgatgtggacatagatagaattaataagcctgatttgcccttagttagtggtgaaatgtctattgaaacggcctggattctaagcataatagtggctctcttcggccttatcataacaatcaaaatgaaaggtggcccattgtatatatttggttactgtttcggaatttttgcaggctttgcttattcggtacctccaattaggtggaagcagtacccctttactaattttctcatcacaattagttctcacgttattaccaacttcactttctattatgcgtcacgtgccgctttaggtcttccttttgagctgcgcccttcttttactttcttgttagcatttatgaccgtcatgggaatgactatcgcatttgctaaagacatttcggatatagagggggatgctaagtacggtgtttccacagtagcgaccaaattaggcgctagaaatatgacgtttgtggtttcaggtgtgttgttacttagctatgtcgccgccattttggccgggataatctggccacaagcattcaacagtaatgtaatgctgttgtcgcatgcaattcttgcgttctgcctgatctttcaaacgagagaattggcgttagctaattacgcatctgctccctcccggcagttttttgaattcatttggaagctctattatgccgaatacttggtctacgttttcatt

SEQ ID NO: 211 - DNA, 2067 bp, Artificial Sequence
  Synthetic
atggcttcagaaaaagaaattaggagagagagattcttgaacgttttccctaaattagtagaggaattgaacgcatcgcttttggcttacggtatgcctaaggaagcatgtgactggtatgcccactcattgaactacaacactccaggcggtaagctaaatagaggtttgtccgttgtggacacgtatgctattctctccaacaagaccgttgaacaattggggcaagaagaatacgaaaaggttgccattctaggttggtgcattgagttgttgcaggcttactggttggtcgccgatgatatgatggacaagtccattaccagaagaggccaaccatgttggtacaaggttcctgaagttggggaaattgccatctgggacgcattcatgttagaggctgctatctacaagcttttgaaatctcacttcagaaacgaaaaatactacatagatatcaccgaattgttccatgaggtcaccttccaaaccgaattgggccaattgatggacttaatcactgcacctgaagacaaagtcgacttgagtaagttctccctaaagaagcactccttcatagttactttcaagactgcttactattctttctacttgcctgtcgcattggccatgtacgttgccggtatcacggatgaaaaggatttgaaacaagccagagatgtcttgattccattgggtgaatacttccaaattcaagatgactacttagactgcttcggtaccccagaacagatcggtaagatcggtacagatatccaagataacaaatgttcttgggtaatcaacaaggcattggaacttgcttccgcagaacaaagaaagactttagacgaaaattacggtaagaaggactcagtcgcagaagccaaatgcaaaaagattttcaatgacttgaaaattgaacagctataccacgaatatgaagagtctattgccaaggatttgaaggccaaaatttctcaggtcgatgagtctcgtggcttcaaagctgatgtcttaactgcgttcttgaacaaagtttacaagagaagcaaaggcggaggtggttctggtgggggtggttcgggtggtggtgggtcatccgcaggatcagatcaaatagaagggagcccccatcacgagtcggacaacagtatcgcgacaaaaattcttaattttggccatacttgttggaagttacagcgtccttacgtagttaaaggtatgatttctatcgcttgcggtttgttcggtaaggaactactccacaatacgaacttgatatcatggtctttaatgtttaaagccttctttgctctggtcccaattctaagtttcaattttttcgcagccattatgaatcaaatctatgatgttgacatagataggattaacaagccggatttaccactcgtgtccggagaaatgtctatagagacagcttggatcctgtcgattattgtcgctcttactggcttgatagttaccattaaaatgaaaggtggccctttatttgtgtttatctatatatttggtatattcgcaggttttgcttactctgtacctccaattcgatggaagcagtatccgttcactaactttttgatcaccatttcaagccatgttggactagccttcacatcctactatgcttctagagccgcgcttggtctaccatttgaactgcgcccctcatttagttttataattgcattcatgacagttatggggatgactattgcctttgcaaaggacatttcagatattgaaggagatgcaaaatatggtgtctctacggtagctactaaattaggtgctagaaatatgaccttcgttgtgtcgggggtgttgctattaaattacttagtcagtattttggcaggaataatctggccccaagcttttaattcaaatgtcatgatcttatcgcacgcaattttggccttctgtctcatctttcaaacgagagaattagcccttgctaactacgcaagtgctccttcccgtcaatttttcgagtttatttggttgctgtattatgcggaatacctggtatacgttttcatt

SEQ ID NO: 212 - DNA, 2037 bp, Artificial Sequence
  Synthetic
atggcttcagaaaaagaaattaggagagagagattcttgaacgttttccctaaattagtagaggaattgaacgcatcgcttttggcttacggtatgcctaaggaagcatgtgactggtatgcccactcattgaactacaacactccaggcggtaagctaaatagaggtttgtccgttgtggacacgtatgctattctctccaacaagaccgttgaacaattggggcaagaagaatacgaaaaggttgccattctaggttggtgcattgagttgttgcaggcttactggttggtcgccgatgatatgatggacaagtccattaccagaagaggccaaccatgttggtacaaggttcctgaagttggggaaattgccatctgggacgcattcatgttagaggctgctatctacaagcttttgaaatctcacttcagaaacgaaaaatactacatagatatcaccgaattgttccatgaggtcaccttccaaaccgaattgggccaattgatggacttaatcactgcacctgaagacaaagtcgacttgagtaagttctccctaaagaagcactccttcatagttactttcaagactgcttactattctttctacttgcctgtcgcattggccatgtacgttgccggtatcacggatgaaaaggatttgaaacaagccagagatgtcttgattccattgggtgaatacttccaaattcaagatgactacttagactgcttcggtaccccagaacagatcggtaagatcggtacagatatccaagataacaaatgttcttgggtaatcaacaaggcattggaacttgcttccgcagaacaaagaaagactttagacgaaaattacggtaagaaggactcagtcgcagaagccaaatgcaaaaagattttcaatgacttgaaaattgaacagctataccacgaatatgaagagtctattgccaaggatttgaaggccaaaatttctcaggtcgatgagtctcgtggcttcaaagctgatgtcttaactgcgttcttgaacaaagtttacaagagaagcaaaggttctggatcagctggttccgaccaaattgaagggagcccgcatcacgagagtgataactctatcgcaacaaagatattgaatttcggccatacttgctggaaactgcagaggccatatgtagtgaaaggaatgatttctatcgcctgtggtctttttggtcgtgaaaaactatcagatttttctcctttattctttgttgggatgtggaaggcgtttttcgctttagttccaattttgagttttaatttctttgcagctataatgaaccaaatttacgacgtcgatatagatcgcatcaataagcccgacttacctctcgtttcgggagaaatgtcaatagagactgcctggatcctttccattattgtagcattgaccggtctgatagtgacgattttggtcggctcttggccattgttcgtttttatctatatattcggaatttttgcaggctttgcttactccgttccgcctatccgatggaaacaatatccatttacaaacttcctaattaccatctcaagccacgtcggtttagctttcactagctatagtcatattcagacacacgtatttaaaagaccagcagtattttcgagagccttcagtttcatcatagcttttatgacagtgatgggtatgactattgcctttgccaaggatatttctgatatagaaggagatgcgaaatacggggttagtaccgtcgctacgaagttaggtgcgagaaatatgacgtttgtggttagcggtgtactcttattgaactatctggtgtctatttctattggtgctagctcagggttcctttggagcaaaaatataatgatcttatcacatgcaattctcgctttctgtcttatattccaaactagggaactagccttggcaaactacgcatccgctccctctaggcagttttttgaatttatttggttgttatactatgctgaatatttcctaattccactagttaga

SEQ ID NO: 213 - DNA, 2043 bp, Artificial Sequence
  Synthetic
atggcttcagaaaaagaaattaggagagagagattcttgaacgttttccctaaattagtagaggaattgaacgcatcgcttttggcttacggtatgcctaaggaagcatgtgactggtatgcccactcattgaactacaacactccaggcggtaagctaaatagaggtttgtccgttgtggacacgtatgctattctctccaacaagaccgttgaacaattggggcaagaagaatacgaaaaggttgccattctaggttggtgcattgagttgttgcaggcttactggttggtcgccgatgatatgatggacaagtccattaccagaagaggccaaccatgttggtacaaggttcctgaagttggggaaattgccatctgggacgcattcatgttagaggctgctatctacaagcttttgaaatctcacttcagaaacgaaaaatactacatagatatcaccgaattgttccatgaggtcaccttccaaaccgaattgggccaattgatggacttaatcactgcacctgaagacaaagtcgacttgagtaagttctccctaaagaagcactccttcatagttactttcaagactgcttactattctttctacttgcctgtcgcattggccatgtacgttgccggtatcacggatgaaaaggatttgaaacaagccagagatgtcttgattccattgggtgaatacttccaaattcaagatgactacttagactgcttcggtaccccagaacagatcggtaagatcggtacagatatccaagataacaaatgttcttgggtaatcaacaaggcattggaacttgcttccgcagaacaaagaaagactttagacgaaaattacggtaagaaggactcagtcgcagaagccaaatgcaaaaagattttcaatgacttgaaaattgaacagctataccacgaatatgaagagtctattgccaaggatttgaaggccaaaatttctcaggtcgatgagtctcgtggcttcaaagctgatgtcttaactgcgttcttgaacaaagtttacaagagaagcaaaggcggaggtggttcttcagctggttccgaccaaattgaagggagcccgcatcacgagagtgataactctatcgcaacaaagatattgaatttcggccatacttgctggaaactgcagaggccatatgtagtgaaaggaatgatttctatcgcctgtggtctttttggtcgtgaaaaactatcagatttttctcctttattctttgttgggatgtggaaggcgtttttcgctttagttccaattttgagttttaatttctttgcagctataatgaaccaaatttacgacgtcgatatagatcgcatcaataagcccgacttacctctcgtttcgggagaaatgtcaatagagactgcctggatcctttccattattgtagcattgaccggtctgatagtgacgattttggtcggctcttggccattgttcgtttttatctatatattcggaatttttgcaggctttgcttactccgttccgcctatccgatggaaacaatatccatttacaaacttcctaattaccatctcaagccacgtcggtttagctttcactagctatagtcatattcagacacacgtatttaaaagaccagcagtattttcgagagccttcagtttcatcatagcttttatgacagtgatgggtatgactattgcctttgccaaggatatttctgatatagaaggagatgcgaaatacggggttagtaccgtcgctacgaagttaggtgcgagaaatatgacgtttgtggttagcggtgtactcttattgaactatctggtgtctatttctattggtgctagctcagggttcctttggagcaaaaatataatgatcttatcacatgcaattctcgctttctgtcttatattccaaactagggaactagccttggcaaactacgcatccgctccctctaggcagttttttgaatttatttggttgttatactatgctgaatatttcctaattccactagttaga

SEQ ID NO: 214 - DNA, 2031 bp, Artificial Sequence
  Synthetic
atggcttcagaaaaagaaattaggagagagagattcttgaacgttttccctaaattagtagaggaattgaacgcatcgcttttggcttacggtatgcctaaggaagcatgtgactggtatgcccactcattgaactacaacactccaggcggtaagctaaatagaggtttgtccgttgtggacacgtatgctattctctccaacaagaccgttgaacaattggggcaagaagaatacgaaaaggttgccattctaggttggtgcattgagttgttgcaggcttactggttggtcgccgatgatatgatggacaagtccattaccagaagaggccaaccatgttggtacaaggttcctgaagttggggaaattgccatctgggacgcattcatgttagaggctgctatctacaagcttttgaaatctcacttcagaaacgaaaaatactacatagatatcaccgaattgttccatgaggtcaccttccaaaccgaattgggccaattgatggacttaatcactgcacctgaagacaaagtcgacttgagtaagttctccctaaagaagcactccttcatagttactttcaagactgcttactattctttctacttgcctgtcgcattggccatgtacgttgccggtatcacggatgaaaaggatttgaaacaagccagagatgtcttgattccattgggtgaatacttccaaattcaagatgactacttagactgcttcggtaccccagaacagatcggtaagatcggtacagatatccaagataacaaatgttcttgggtaatcaacaaggcattggaacttgcttccgcagaacaaagaaagactttagacgaaaattacggtaagaaggactcagtcgcagaagccaaatgcaaaaagattttcaatgacttgaaaattgaacagctataccacgaatatgaagagtctattgccaaggatttgaaggccaaaatttctcaggtcgatgagtctcgtggcttcaaagctgatgtcttaactgcgttcttgaacaaagtttacaagagaagcaaaggttctggatcagccgggagcgaccagatagaaggaagtcctcatcacgagtctgataactccattgcgacaaaaatcctgaatttcggtcatacgtgctggaagttacaaaggccctatgtcgtgaaaggtatgatttcgatagcttgtggcttgtttggtcgcgaactatttcataataccaaccttttatcttggtcattgatgctcaaggcattctcatccttaatggtaatcctttcttttaatttctttgctgccataatgaatcaaatttacgatgttgatattgaccgaattaacaaaccagatttgccactcgttagtggagagatgagtatcgaaactgcatggatactatcgatcattgtcgctctgacaggcttaatattgactattaagcttaattgtggtccgctatttatatcattgtattgcgtatctattttcgctggatttgcatacagcgttcctccaattcgttggaaacagtatcctttcaccaacttcttaataactatcagctcacacgtgggtgttaactttacatgttattacgcctccagagcagcctttggcttacccttcgaaatgtctccgccatttacttttattctcgcttttatgaccgtaatgggaatgacaatagctttcgcgaaagacatttcagatatcgaaggtgatgcgaaatatggggtgtctactgttgctacgaagttaggtgcaagaaatatgacgtttgttgtcagtggtgtcttgttgctgacatacgtaagcgctatacttgcagctatcatttggccgcaagcctttaagtcaaatgtgatgttgttatctcatgccatcctggcgttctgcctaattttccaaactagagagctagcgcttgcaaattatgcttctgcacctagtaggcagttttttgaatttatctggaaattgcattatgcagagtacttagtttatgttttcatc

SEQ ID NO: 215 - DNA, 2067 bp, Artificial Sequence
  Synthetic
atggcttcagaaaaagaaattaggagagagagattcttgaacgttttccctaaattagtagaggaattgaacgcatcgcttttggcttacggtatgcctaaggaagcatgtgactggtatgcccactcattgaactacaacactccaggcggtaagctaaatagaggtttgtccgttgtggacacgtatgctattctctccaacaagaccgttgaacaattggggcaagaagaatacgaaaaggttgccattctaggttggtgcattgagttgttgcaggcttactggttggtcgccgatgatatgatggacaagtccattaccagaagaggccaaccatgttggtacaaggttcctgaagttggggaaattgccatctgggacgcattcatgttagaggctgctatctacaagcttttgaaatctcacttcagaaacgaaaaatactacatagatatcaccgaattgttccatgaggtcaccttccaaaccgaattgggccaattgatggacttaatcactgcacctgaagacaaagtcgacttgagtaagttctccctaaagaagcactccttcatagttactttcaagactgcttactattctttctacttgcctgtcgcattggccatgtacgttgccggtatcacggatgaaaaggatttgaaacaagccagagatgtcttgattccattgggtgaatacttccaaattcaagatgactacttagactgcttcggtaccccagaacagatcggtaagatcggtacagatatccaagataacaaatgttcttgggtaatcaacaaggcattggaacttgcttccgcagaacaaagaaagactttagacgaaaattacggtaagaaggactcagtcgcagaagccaaatgcaaaaagattttcaatgacttgaaaattgaacagctataccacgaatatgaagagtctattgccaaggatttgaaggccaaaatttctcaggtcgatgagtctcgtggcttcaaagctgatgtcttaactgcgttcttgaacaaagtttacaagagaagcaaaggcggaggtggttctggtgggggtggttcgggtggtggtgggtcaagcgccgggtcggatcaaattgaaggtagtccgcatcacgagtcagacaattccatcgcgactaaaattctgaacttcggccatacgtgttggaagctccagaggccttatgtcgtaaaaggtatgatatctattgcatgcggattatttggtaaggaattgctacataataccaaccttatctcttggtcattaatgtttaaagctttctttttcttggttgctatattatcctttaatttctttgcagccattatgaaccaaatatacgatgtggacatcgatcgaattaataagcccgatcttccattggttagtggcgagatgagcatagaaacagcttggattctatctattattgtagcactgtttggactcatcataactattaaaatgaaaggtggtccattgtatattttcgggtactgtttcggtatatttgcaggttttgcttattctgtccctccaatcagatggaagcagtaccctttcacaaactttctgataacaatatcgtcacacgtgggaacgaattttactttttattacgcttcgcgtgccgccttgggcttaccgtttgaattaagaccatccttcaccttcttgttagcttttatgacggttatgggtatgacaattgcgttcgcgaaagacatctcagatatcgaaggcgacgcaaaatatggggttagtactgtcgctaccaagctaggagctagaaatatgacttttgttgtatccggagtcctgttactcagttacgtggcagcgattcttgctggtattatctggccacaagcttttaactctaatgtaatgctattgtcacatgccatattggcgttctgtctgatttttcaaactcgcgaacttgctttagccaactatgcatctgcaccttcaaggcaattcttcgaatttatttggaagctatattatgcagagtaccttgtttacgtgtttatc

SEQ ID NO: 216 - DNA, 2127 bp, Artificial Sequence
  Synthetic
atggcttcagaaaaagaaattaggagagagagattcttgaacgttttccctaaattagtagaggaattgaacgcatcgcttttggcttacggtatgcctaaggaagcatgtgactggtatgcccactcattgaactacaacactccaggcggtaagctaaatagaggtttgtccgttgtggacacgtatgctattctctccaacaagaccgttgaacaattggggcaagaagaatacgaaaaggttgccattctaggttggtgcattgagttgttgcaggcttactggttggtcgccgatgatatgatggacaagtccattaccagaagaggccaaccatgttggtacaaggttcctgaagttggggaaattgccatctgggacgcattcatgttagaggctgctatctacaagcttttgaaatctcacttcagaaacgaaaaatactacatagatatcaccgaattgttccatgaggtcaccttccaaaccgaattgggccaattgatggacttaatcactgcacctgaagacaaagtcgacttgagtaagttctccctaaagaagcactccttcatagttactttcaagactgcttactattctttctacttgcctgtcgcattggccatgtacgttgccggtatcacggatgaaaaggatttgaaacaagccagagatgtcttgattccattgggtgaatacttccaaattcaagatgactacttagactgcttcggtaccccagaacagatcggtaagatcggtacagatatccaagataacaaatgttcttgggtaatcaacaaggcattggaacttgcttccgcagaacaaagaaagactttagacgaaaattacggtaagaaggactcagtcgcagaagccaaatgcaaaaagattttcaatgacttgaaaattgaacagctataccacgaatatgaagagtctattgccaaggatttgaaggccaaaatttctcaggtcgatgagtctcgtggcttcaaagctgatgtcttaactgcgttcttgaacaaagtttacaagagaagcaaaggcggaggtggttctggtgggggtggttcgggtggtggtgggtcaggtggtggcggtagcggtggcggtggttccggtggtggtggtagtggaggtgggggttcttcggcagggtccgaccagattgaaggctctccacaccatgagtcagataatagtatagcgacaaagatcctaaacttcggtcatacttgctggaaattacaacgaccgtatgtagtcaaaggtatgatttccatcgcctgtggactgtttggaaaggaactcttacataataccaaccttataagctggtcattgatgtttaaagctttcttctttctagttgctattttgtcttttaattttttcgcagcaattatgaaccaaatctacgatgtggacatagatagaattaataagcctgatttgcccttagttagtggtgaaatgtctattgaaacggcctggattctaagcataatagtggctctcttcggccttatcataacaatcaaaatgaaaggtggcccattgtatatatttggttactgtttcggaatttttgcaggctttgcttattcggtacctccaattaggtggaagcagtacccctttactaattttctcatcacaattagttctcacgttattaccaacttcactttctattatgcgtcacgtgccgctttaggtcttccttttgagctgcgcccttcttttactttcttgttagcatttatgaccgtcatgggaatgactatcgcatttgctaaagacatttcggatatagagggggatgctaagtacggtgtttccacagtagcgaccaaattaggcgctagaaatatgacgtttgtggtttcaggtgtgttgttacttagctatgtcgccgccattttggccgggataatctggccacaagcattcaacagtaatgtaatgctgttgtcgcatgcaattcttgcgttctgcctgatctttcaaacgagagaattggcgttagctaattacgcatctgctccctcccggcagttttttgaattcatttggaagctctattatgccgaatacttggtctacgttttcatt

SEQ ID NO: 217 - DNA, 2037 bp, Artificial Sequence
  Synthetic
atggcttcagaaaaagaaattaggagagagagattcttgaacgttttccctaaattagtagaggaattgaacgcatcgcttttggcttacggtatgcctaaggaagcatgtgactggtatgcccactcattgaactacaacactccaggcggtaagctaaatagaggtttgtccgttgtggacacgtatgctattctctccaacaagaccgttgaacaattggggcaagaagaatacgaaaaggttgccattctaggttggtgcattgagttgttgcaggcttactggttggtcgccgatgatatgatggacaagtccattaccagaagaggccaaccatgttggtacaaggttcctgaagttggggaaattgccatctgggacgcattcatgttagaggctgctatctacaagcttttgaaatctcacttcagaaacgaaaaatactacatagatatcaccgaattgttccatgaggtcaccttccaaaccgaattgggccaattgatggacttaatcactgcacctgaagacaaagtcgacttgagtaagttctccctaaagaagcactccttcatagttactttcaagactgcttactattctttctacttgcctgtcgcattggccatgtacgttgccggtatcacggatgaaaaggatttgaaacaagccagagatgtcttgattccattgggtgaatacttccaaattcaagatgactacttagactgcttcggtaccccagaacagatcggtaagatcggtacagatatccaagataacaaatgttcttgggtaatcaacaaggcattggaacttgcttccgcagaacaaagaaagactttagacgaaaattacggtaagaaggactcagtcgcagaagccaaatgcaaaaagattttcaatgacttgaaaattgaacagctataccacgaatatgaagagtctattgccaaggatttgaaggccaaaatttctcaggtcgatgagtctcgtggcttcaaagctgatgtcttaactgcgttcttgaacaaagtttacaagagaagcaaaggcggaggtggttctagcgccgggtcggatcaaattgaaggtagtccgcatcacgagtcagacaattccatcgcgactaaaattctgaacttcggccatacgtgttggaagctccagaggccttatgtcgtaaaaggtatgatatctattgcatgcggattatttggtaaggaattgctacataataccaaccttatctcttggtcattaatgtttaaagctttctttttcttggttgctatattatcctttaatttctttgcagccattatgaaccaaatatacgatgtggacatcgatcgaattaataagcccgatcttccattggttagtggcgagatgagcatagaaacagcttggattctatctattattgtagcactgtttggactcatcataactattaaaatgaaaggtggtccattgtatattttcgggtactgtttcggtatatttgcaggttttgcttattctgtccctccaatcagatggaagcagtaccctttcacaaactttctgataacaatatcgtcacacgtgggaacgaattttactttttattacgcttcgcgtgccgccttgggcttaccgtttgaattaagaccatccttcaccttcttgttagcttttatgacggttatgggtatgacaattgcgttcgcgaaagacatctcagatatcgaaggcgacgcaaaatatggggttagtactgtcgctaccaagctaggagctagaaatatgacttttgttgtatccggagtcctgttactcagttacgtggcagcgattcttgctggtattatctggccacaagcttttaactctaatgtaatgctattgtcacatgccatattggcgttctgtctgatttttcaaactcgcgaacttgctttagccaactatgcatctgcaccttcaaggcaattcttcgaatttatttggaagctatattatgcagagtaccttgtttacgtgtttatc

SEQ ID NO: 218 - DNA, 2031 bp, Artificial Sequence
  Synthetic
atggcttcagaaaaagaaattaggagagagagattcttgaacgttttccctaaattagtagaggaattgaacgcatcgcttttggcttacggtatgcctaaggaagcatgtgactggtatgcccactcattgaactacaacactccaggcggtaagctaaatagaggtttgtccgttgtggacacgtatgctattctctccaacaagaccgttgaacaattggggcaagaagaatacgaaaaggttgccattctaggttggtgcattgagttgttgcaggcttactggttggtcgccgatgatatgatggacaagtccattaccagaagaggccaaccatgttggtacaaggttcctgaagttggggaaattgccatctgggacgcattcatgttagaggctgctatctacaagcttttgaaatctcacttcagaaacgaaaaatactacatagatatcaccgaattgttccatgaggtcaccttccaaaccgaattgggccaattgatggacttaatcactgcacctgaagacaaagtcgacttgagtaagttctccctaaagaagcactccttcatagttactttcaagactgcttactattctttctacttgcctgtcgcattggccatgtacgttgccggtatcacggatgaaaaggatttgaaacaagccagagatgtcttgattccattgggtgaatacttccaaattcaagatgactacttagactgcttcggtaccccagaacagatcggtaagatcggtacagatatccaagataacaaatgttcttgggtaatcaacaaggcattggaacttgcttccgcagaacaaagaaagactttagacgaaaattacggtaagaaggactcagtcgcagaagccaaatgcaaaaagattttcaatgacttgaaaattgaacagctataccacgaatatgaagagtctattgccaaggatttgaaggccaaaatttctcaggtcgatgagtctcgtggcttcaaagctgatgtcttaactgcgttcttgaacaaagtttacaagagaagcaaaggttctggaagcgccgggtcggatcaaattgaaggtagtccgcatcacgagtcagacaattccatcgcgactaaaattctgaacttcggccatacgtgttggaagctccagaggccttatgtcgtaaaaggtatgatatctattgcatgcggattatttggtaaggaattgctacataataccaaccttatctcttggtcattaatgtttaaagctttctttttcttggttgctatattatcctttaatttctttgcagccattatgaaccaaatatacgatgtggacatcgatcgaattaataagcccgatcttccattggttagtggcgagatgagcatagaaacagcttggattctatctattattgtagcactgtttggactcatcataactattaaaatgaaaggtggtccattgtatattttcgggtactgtttcggtatatttgcaggttttgcttattctgtccctccaatcagatggaagcagtaccctttcacaaactttctgataacaatatcgtcacacgtgggaacgaattttactttttattacgcttcgcgtgccgccttgggcttaccgtttgaattaagaccatccttcaccttcttgttagcttttatgacggttatgggtatgacaattgcgttcgcgaaagacatctcagatatcgaaggcgacgcaaaatatggggttagtactgtcgctaccaagctaggagctagaaatatgacttttgttgtatccggagtcctgttactcagttacgtggcagcgattcttgctggtattatctggccacaagcttttaactctaatgtaatgctattgtcacatgccatattggcgttctgtctgatttttcaaactcgcgaacttgctttagccaactatgcatctgcaccttcaaggcaattcttcgaatttatttggaagctatattatgcagagtaccttgtttacgtgtttatc

SEQ ID NO: 219 - DNA, 2067 bp, Artificial Sequence
  Synthetic
atggcttcagaaaaagaaattaggagagagagattcttgaacgttttccctaaattagtagaggaattgaacgcatcgcttttggcttacggtatgcctaaggaagcatgtgactggtatgcccactcattgaactacaacactccaggcggtaagctaaatagaggtttgtccgttgtggacacgtatgctattctctccaacaagaccgttgaacaattggggcaagaagaatacgaaaaggttgccattctaggttggtgcattgagttgttgcaggcttactggttggtcgccgatgatatgatggacaagtccattaccagaagaggccaaccatgttggtacaaggttcctgaagttggggaaattgccatctgggacgcattcatgttagaggctgctatctacaagcttttgaaatctcacttcagaaacgaaaaatactacatagatatcaccgaattgttccatgaggtcaccttccaaaccgaattgggccaattgatggacttaatcactgcacctgaagacaaagtcgacttgagtaagttctccctaaagaagcactccttcatagttactttcaagactgcttactattctttctacttgcctgtcgcattggccatgtacgttgccggtatcacggatgaaaaggatttgaaacaagccagagatgtcttgattccattgggtgaatacttccaaattcaagatgactacttagactgcttcggtaccccagaacagatcggtaagatcggtacagatatccaagataacaaatgttcttgggtaatcaacaaggcattggaacttgcttccgcagaacaaagaaagactttagacgaaaattacggtaagaaggactcagtcgcagaagccaaatgcaaaaagattttcaatgacttgaaaattgaacagctataccacgaatatgaagagtctattgccaaggatttgaaggccaaaatttctcaggtcgatgagtctcgtggcttcaaagctgatgtcttaactgcgttcttgaacaaagtttacaagagaagcaaaggcggaggtggttctggtgggggtggttcgggtggtggtgggtcatcggcagggtccgaccagattgaaggctctccacaccatgagtcagataatagtatagcgacaaagatcctaaacttcggtcatacttgctggaaattacaacgaccgtatgtagtcaaaggtatgatttccatcgcctgtggactgtttggaaaggaactcttacataataccaaccttataagctggtcattgatgtttaaagctttcttctttctagttgctattttgtcttttaattttttcgcagcaattatgaaccaaatctacgatgtggacatagatagaattaataagcctgatttgcccttagttagtggtgaaatgtctattgaaacggcctggattctaagcataatagtggctctcttcggccttatcataacaatcaaaatgaaaggtggcccattgtatatatttggttactgtttcggaatttttgcaggctttgcttattcggtacctccaattaggtggaagcagtacccctttactaattttctcatcacaattagttctcacgttattaccaacttcactttctattatgcgtcacgtgccgctttaggtcttccttttgagctgcgcccttcttttactttcttgttagcatttatgaccgtcatgggaatgactatcgcatttgctaaagacatttcggatatagagggggatgctaagtacggtgtttccacagtagcgaccaaattaggcgctagaaatatgacgtttgtggtttcaggtgtgttgttacttagctatgtcgccgccattttggccgggataatctggccacaagcattcaacagtaatgtaatgctgttgtcgcatgcaattcttgcgttctgcctgatctttcaaacgagagaattggcgttagctaattacgcatctgctccctcccggcagttttttgaattcatttggaagctctattatgccgaatacttggtctacgttttcatt

SEQ ID NO: 220 - DNA, 2097 bp, Artificial Sequence
  Synthetic
atggcttcagaaaaagaaattaggagagagagattcttgaacgttttccctaaattagtagaggaattgaacgcatcgcttttggcttacggtatgcctaaggaagcatgtgactggtatgcccactcattgaactacaacactccaggcggtaagctaaatagaggtttgtccgttgtggacacgtatgctattctctccaacaagaccgttgaacaattggggcaagaagaatacgaaaaggttgccattctaggttggtgcattgagttgttgcaggcttactggttggtcgccgatgatatgatggacaagtccattaccagaagaggccaaccatgttggtacaaggttcctgaagttggggaaattgccatctgggacgcattcatgttagaggctgctatctacaagcttttgaaatctcacttcagaaacgaaaaatactacatagatatcaccgaattgttccatgaggtcaccttccaaaccgaattgggccaattgatggacttaatcactgcacctgaagacaaagtcgacttgagtaagttctccctaaagaagcactccttcatagttactttcaagactgcttactattctttctacttgcctgtcgcattggccatgtacgttgccggtatcacggatgaaaaggatttgaaacaagccagagatgtcttgattccattgggtgaatacttccaaattcaagatgactacttagactgcttcggtaccccagaacagatcggtaagatcggtacagatatccaagataacaaatgttcttgggtaatcaacaaggcattggaacttgcttccgcagaacaaagaaagactttagacgaaaattacggtaagaaggactcagtcgcagaagccaaatgcaaaaagattttcaatgacttgaaaattgaacagctataccacgaatatgaagagtctattgccaaggatttgaaggccaaaatttctcaggtcgatgagtctcgtggcttcaaagctgatgtcttaactgcgttcttgaacaaagtttacaagagaagcaaaggcggaggtggttctggtgggggtggttcgggtggtggtgggtcaggtggtggcggtagcggtggcggtggttccagcgccgggtcggatcaaattgaaggtagtccgcatcacgagtcagacaattccatcgcgactaaaattctgaacttcggccatacgtgttggaagctccagaggccttatgtcgtaaaaggtatgatatctattgcatgcggattatttggtaaggaattgctacataataccaaccttatctcttggtcattaatgtttaaagctttctttttcttggttgctatattatcctttaatttctttgcagccattatgaaccaaatatacgatgtggacatcgatcgaattaataagcccgatcttccattggttagtggcgagatgagcatagaaacagcttggattctatctattattgtagcactgtttggactcatcataactattaaaatgaaaggtggtccattgtatattttcgggtactgtttcggtatatttgcaggttttgcttattctgtccctccaatcagatggaagcagtaccctttcacaaactttctgataacaatatcgtcacacgtgggaacgaattttactttttattacgcttcgcgtgccgccttgggcttaccgtttgaattaagaccatccttcaccttcttgttagcttttatgacggttatgggtatgacaattgcgttcgcgaaagacatctcagatatcgaaggcgacgcaaaatatggggttagtactgtcgctaccaagctaggagctagaaatatgacttttgttgtatccggagtcctgttactcagttacgtggcagcgattcttgctggtattatctggccacaagcttttaactctaatgtaatgctattgtcacatgccatattggcgttctgtctgatttttcaaactcgcgaacttgctttagccaactatgcatctgcaccttcaaggcaattcttcgaatttatttggaagctatattatgcagagtaccttgtttacgtgtttatc

SEQ ID NO: 221 - DNA, 2133 bp, Artificial Sequence
  Synthetic
atggcttcagaaaaagaaattaggagagagagattcttgaacgttttccctaaattagtagaggaattgaacgcatcgcttttggcttacggtatgcctaaggaagcatgtgactggtatgcccactcattgaactacaacactccaggcggtaagctaaatagaggtttgtccgttgtggacacgtatgctattctctccaacaagaccgttgaacaattggggcaagaagaatacgaaaaggttgccattctaggttggtgcattgagttgttgcaggcttactggttggtcgccgatgatatgatggacaagtccattaccagaagaggccaaccatgttggtacaaggttcctgaagttggggaaattgccatctgggacgcattcatgttagaggctgctatctacaagcttttgaaatctcacttcagaaacgaaaaatactacatagatatcaccgaattgttccatgaggtcaccttccaaaccgaattgggccaattgatggacttaatcactgcacctgaagacaaagtcgacttgagtaagttctccctaaagaagcactccttcatagttactttcaagactgcttactattctttctacttgcctgtcgcattggccatgtacgttgccggtatcacggatgaaaaggatttgaaacaagccagagatgtcttgattccattgggtgaatacttccaaattcaagatgactacttagactgcttcggtaccccagaacagatcggtaagatcggtacagatatccaagataacaaatgttcttgggtaatcaacaaggcattggaacttgcttccgcagaacaaagaaagactttagacgaaaattacggtaagaaggactcagtcgcagaagccaaatgcaaaaagattttcaatgacttgaaaattgaacagctataccacgaatatgaagagtctattgccaaggatttgaaggccaaaatttctcaggtcgatgagtctcgtggcttcaaagctgatgtcttaactgcgttcttgaacaaagtttacaagagaagcaaaggcggaggtggttctggtgggggtggttcgggtggtggtgggtcaggtggtggcggtagcggtggcggtggttccggtggtggtggtagtggaggtgggggttcttcagctggttccgaccaaattgaagggagcccgcatcacgagagtgataactctatcgcaacaaagatattgaatttcggccatacttgctggaaactgcagaggccatatgtagtgaaaggaatgatttctatcgcctgtggtctttttggtcgtgaaaaactatcagatttttctcctttattctttgttgggatgtggaaggcgtttttcgctttagttccaattttgagttttaatttctttgcagctataatgaaccaaatttacgacgtcgatatagatcgcatcaataagcccgacttacctctcgtttcgggagaaatgtcaatagagactgcctggatcctttccattattgtagcattgaccggtctgatagtgacgattttggtcggctcttggccattgttcgtttttatctatatattcggaatttttgcaggctttgcttactccgttccgcctatccgatggaaacaatatccatttacaaacttcctaattaccatctcaagccacgtcggtttagctttcactagctatagtcatattcagacacacgtatttaaaagaccagcagtattttcgagagccttcagtttcatcatagcttttatgacagtgatgggtatgactattgcctttgccaaggatatttctgatatagaaggagatgcgaaatacggggttagtaccgtcgctacgaagttaggtgcgagaaatatgacgtttgtggttagcggtgtactcttattgaactatctggtgtctatttctattggtgctagctcagggttcctttggagcaaaaatataatgatcttatcacatgcaattctcgctttctgtcttatattccaaactagggaactagccttggcaaactacgcatccgctccctctaggcagttttttgaatttatttggttgttatactatgctgaatatttcctaattccactagttaga

SEQ ID NO: 222 - DNA, 2031 bp, Artificial Sequence
  Synthetic
atggcttcagaaaaagaaattaggagagagagattcttgaacgttttccctaaattagtagaggaattgaacgcatcgcttttggcttacggtatgcctaaggaagcatgtgactggtatgcccactcattgaactacaacactccaggcggtaagctaaatagaggtttgtccgttgtggacacgtatgctattctctccaacaagaccgttgaacaattggggcaagaagaatacgaaaaggttgccattctaggttggtgcattgagttgttgcaggcttactggttggtcgccgatgatatgatggacaagtccattaccagaagaggccaaccatgttggtacaaggttcctgaagttggggaaattgccatctgggacgcattcatgttagaggctgctatctacaagcttttgaaatctcacttcagaaacgaaaaatactacatagatatcaccgaattgttccatgaggtcaccttccaaaccgaattgggccaattgatggacttaatcactgcacctgaagacaaagtcgacttgagtaagttctccctaaagaagcactccttcatagttactttcaagactgcttactattctttctacttgcctgtcgcattggccatgtacgttgccggtatcacggatgaaaaggatttgaaacaagccagagatgtcttgattccattgggtgaatacttccaaattcaagatgactacttagactgcttcggtaccccagaacagatcggtaagatcggtacagatatccaagataacaaatgttcttgggtaatcaacaaggcattggaacttgcttccgcagaacaaagaaagactttagacgaaaattacggtaagaaggactcagtcgcagaagccaaatgcaaaaagattttcaatgacttgaaaattgaacagctataccacgaatatgaagagtctattgccaaggatttgaaggccaaaatttctcaggtcgatgagtctcgtggcttcaaagctgatgtcttaactgcgttcttgaacaaagtttacaagagaagcaaaggttctggatctgcaggaagtgatcagatagaaggcagcccccaccatgagtccgacaattcgatcgccacaaagattttaaactttggtcatacctgttggaaacttcaaaggccttacgtcgttaaagggatgatttctatcgcgtgcggtctattcggtcgcgaactgttgcacaatacgaacttaatatcatggagtctcatgtttaaggctttctttgctttggtaccaattctgtcattcaatttttttgcagccataatgaaccaaatttatgatgtggacatcgatagaattaataaaccggatttacctttggtttctggggagatgtcaatagaaactgcttggatactatccattatcgtggcactaacaggccttattgttactattaaaatgaagggtggaccactttttgtattcatatatatcttcggtatttttgcgggcttcgcttactcggtcccaccgatcagatggaaacagtatccttttacgaacttcttaatcactatttcatcgcatgttggattagcttttacctcttattacgccagtcgtgcagctttgggtttgccatttgaattgcggccaagcttcagcttcatcatagcctttatgacagttatgggtatgactattgcatttgcgaaagacatatccgatattgaaggcgacgccaagtatggtgtgtctaccgtagcaacaaagctgggggctcgaaatatgacttttgtcgtcagtggagttctgttgttaaactaccttgtatcaattagtgctggcattatatggccacaagcatttaattctaatattatgatcctgtcacacgctattttagcgttctgtttgatctttcaaacaagggagcttgcattggcgaattatgcttctgcaccctccaggcagttctttgaatttatatggttactgtattacgcagagtacctagtgtatgttttcatt

SEQ ID NO: 223 - DNA, 2127 bp, Artificial Sequence
  Synthetic
atggcttcagaaaaagaaattaggagagagagattcttgaacgttttccctaaattagtagaggaattgaacgcatcgcttttggcttacggtatgcctaaggaagcatgtgactggtatgcccactcattgaactacaacactccaggcggtaagctaaatagaggtttgtccgttgtggacacgtatgctattctctccaacaagaccgttgaacaattggggcaagaagaatacgaaaaggttgccattctaggttggtgcattgagttgttgcaggcttactggttggtcgccgatgatatgatggacaagtccattaccagaagaggccaaccatgttggtacaaggttcctgaagttggggaaattgccatctgggacgcattcatgttagaggctgctatctacaagcttttgaaatctcacttcagaaacgaaaaatactacatagatatcaccgaattgttccatgaggtcaccttccaaaccgaattgggccaattgatggacttaatcactgcacctgaagacaaagtcgacttgagtaagttctccctaaagaagcactccttcatagttactttcaagactgcttactattctttctacttgcctgtcgcattggccatgtacgttgccggtatcacggatgaaaaggatttgaaacaagccagagatgtcttgattccattgggtgaatacttccaaattcaagatgactacttagactgcttcggtaccccagaacagatcggtaagatcggtacagatatccaagataacaaatgttcttgggtaatcaacaaggcattggaacttgcttccgcagaacaaagaaagactttagacgaaaattacggtaagaaggactcagtcgcagaagccaaatgcaaaaagattttcaatgacttgaaaattgaacagctataccacgaatatgaagagtctattgccaaggatttgaaggccaaaatttctcaggtcgatgagtctcgtggcttcaaagctgatgtcttaactgcgttcttgaacaaagtttacaagagaagcaaaggcggaggtggttctggtgggggtggttcgggtggtggtgggtcaggtggtggcggtagcggtggcggtggttccggtggtggtggtagtggaggtgggggttcttccgcaggatcagatcaaatagaagggagcccccatcacgagtcggacaacagtatcgcgacaaaaattcttaattttggccatacttgttggaagttacagcgtccttacgtagttaaaggtatgatttctatcgcttgcggtttgttcggtaaggaactactccacaatacgaacttgatatcatggtctttaatgtttaaagccttctttgctctggtcccaattctaagtttcaattttttcgcagccattatgaatcaaatctatgatgttgacatagataggattaacaagccggatttaccactcgtgtccggagaaatgtctatagagacagcttggatcctgtcgattattgtcgctcttactggcttgatagttaccattaaaatgaaaggtggccctttatttgtgtttatctatatatttggtatattcgcaggttttgcttactctgtacctccaattcgatggaagcagtatccgttcactaactttttgatcaccatttcaagccatgttggactagccttcacatcctactatgcttctagagccgcgcttggtctaccatttgaactgcgcccctcatttagttttataattgcattcatgacagttatggggatgactattgcctttgcaaaggacatttcagatattgaaggagatgcaaaatatggtgtctctacggtagctactaaattaggtgctagaaatatgaccttcgttgtgtcgggggtgttgctattaaattacttagtcagtattttggcaggaataatctggccccaagcttttaattcaaatgtcatgatcttatcgcacgcaattttggccttctgtctcatctttcaaacgagagaattagcccttgctaactacgcaagtgctccttcccgtcaatttttcgagtttatttggttgctgtattatgcggaatacctggtatacgttttcatt

SEQ ID NO: 224 - DNA, 2097 bp, Artificial Sequence
  Synthetic
atggcttcagaaaaagaaattaggagagagagattcttgaacgttttccctaaattagtagaggaattgaacgcatcgcttttggcttacggtatgcctaaggaagcatgtgactggtatgcccactcattgaactacaacactccaggcggtaagctaaatagaggtttgtccgttgtggacacgtatgctattctctccaacaagaccgttgaacaattggggcaagaagaatacgaaaaggttgccattctaggttggtgcattgagttgttgcaggcttactggttggtcgccgatgatatgatggacaagtccattaccagaagaggccaaccatgttggtacaaggttcctgaagttggggaaattgccatctgggacgcattcatgttagaggctgctatctacaagcttttgaaatctcacttcagaaacgaaaaatactacatagatatcaccgaattgttccatgaggtcaccttccaaaccgaattgggccaattgatggacttaatcactgcacctgaagacaaagtcgacttgagtaagttctccctaaagaagcactccttcatagttactttcaagactgcttactattctttctacttgcctgtcgcattggccatgtacgttgccggtatcacggatgaaaaggatttgaaacaagccagagatgtcttgattccattgggtgaatacttccaaattcaagatgactacttagactgcttcggtaccccagaacagatcggtaagatcggtacagatatccaagataacaaatgttcttgggtaatcaacaaggcattggaacttgcttccgcagaacaaagaaagactttagacgaaaattacggtaagaaggactcagtcgcagaagccaaatgcaaaaagattttcaatgacttgaaaattgaacagctataccacgaatatgaagagtctattgccaaggatttgaaggccaaaatttctcaggtcgatgagtctcgtggcttcaaagctgatgtcttaactgcgttcttgaacaaagtttacaagagaagcaaaggcggaggtggttctggtgggggtggttcgggtggtggtgggtcaggtggtggcggtagcggtggcggtggttcctccgcaggatcagatcaaatagaagggagcccccatcacgagtcggacaacagtatcgcgacaaaaattcttaattttggccatacttgttggaagttacagcgtccttacgtagttaaaggtatgatttctatcgcttgcggtttgttcggtaaggaactactccacaatacgaacttgatatcatggtctttaatgtttaaagccttctttgctctggtcccaattctaagtttcaattttttcgcagccattatgaatcaaatctatgatgttgacatagataggattaacaagccggatttaccactcgtgtccggagaaatgtctatagagacagcttggatcctgtcgattattgtcgctcttactggcttgatagttaccattaaaatgaaaggtggccctttatttgtgtttatctatatatttggtatattcgcaggttttgcttactctgtacctccaattcgatggaagcagtatccgttcactaactttttgatcaccatttcaagccatgttggactagccttcacatcctactatgcttctagagccgcgcttggtctaccatttgaactgcgcccctcatttagttttataattgcattcatgacagttatggggatgactattgcctttgcaaaggacatttcagatattgaaggagatgcaaaatatggtgtctctacggtagctactaaattaggtgctagaaatatgaccttcgttgtgtcgggggtgttgctattaaattacttagtcagtattttggcaggaataatctggccccaagcttttaattcaaatgtcatgatcttatcgcacgcaattttggccttctgtctcatctttcaaacgagagaattagcccttgctaactacgcaagtgctccttcccgtcaatttttcgagtttatttggttgctgtattatgcggaatacctggtatacgttttcatt

SEQ ID NO: 225 - DNA, 2067 bp, Artificial Sequence
  Synthetic
atggcttcagaaaaagaaattaggagagagagattcttgaacgttttccctaaattagtagaggaattgaacgcatcgcttttggcttacggtatgcctaaggaagcatgtgactggtatgcccactcattgaactacaacactccaggcggtaagctaaatagaggtttgtccgttgtggacacgtatgctattctctccaacaagaccgttgaacaattggggcaagaagaatacgaaaaggttgccattctaggttggtgcattgagttgttgcaggcttactggttggtcgccgatgatatgatggacaagtccattaccagaagaggccaaccatgttggtacaaggttcctgaagttggggaaattgccatctgggacgcattcatgttagaggctgctatctacaagcttttgaaatctcacttcagaaacgaaaaatactacatagatatcaccgaattgttccatgaggtcaccttccaaaccgaattgggccaattgatggacttaatcactgcacctgaagacaaagtcgacttgagtaagttctccctaaagaagcactccttcatagttactttcaagactgcttactattctttctacttgcctgtcgcattggccatgtacgttgccggtatcacggatgaaaaggatttgaaacaagccagagatgtcttgattccattgggtgaatacttccaaattcaagatgactacttagactgcttcggtaccccagaacagatcggtaagatcggtacagatatccaagataacaaatgttcttgggtaatcaacaaggcattggaacttgcttccgcagaacaaagaaagactttagacgaaaattacggtaagaaggactcagtcgcagaagccaaatgcaaaaagattttcaatgacttgaaaattgaacagctataccacgaatatgaagagtctattgccaaggatttgaaggccaaaatttctcaggtcgatgagtctcgtggcttcaaagctgatgtcttaactgcgttcttgaacaaagtttacaagagaagcaaaggcggaggtggttctggtgggggtggttcgggtggtggtgggtcatctgcgggctcagaccaaatagaaggatccccccatcacgagagtgataacagcatcgctacaaaaattcttaattttgggcatacctgctggaagttgcagcggccatatgtcgtgaaaggtatgatttcaatagcctgtggtctgttcggtagagaactatttcataatactaacttattgtcttggtcgttaatgctcaaggcatttttcgctctagtacctatcttatcattcaattttttcgccgcaattatgaatcaaatatacgatgttgacattgatcgtatcaacaaaccggatttaccactcgtttcgggagaaatgtctattgagactgcttggatattgagtattatcgtagcgttgacgggccttatagttacaattaaattgaattgtggacctttgtttgtctttatctatatcttcggtattttcgccggttttgcttacagtgtgccacctataaggtggaagcaatatccttttacaaactttctaattaccatatcctcgcacgtcggtttagcattcacctcttattacgcctctagagcagcttttggccttccattcgaaatgagccccccgttttccttcattatagcatttatgactgtgatgggtatgacgatcgcgttcgctaaagatatttcagacatagaaggggacgccaagtacggagtttcaactgtagctactaagttgggcgctagaaatatgacatttgttgtatctggtgtcctgttactaaactatttagttagcatttctgcagcaatcatctggcctcaggccttcaaatcgaatattatgattctctctcatgcaattcttgcgttttgcctgatttttcaaactcgcgagctcgccctcgctaattacgcatccgcgccatctcgtcaatttttcgaatttatttggctattgtattatgctgaatatttagtgtacgtctttata

SEQ ID NO: 226 - protein, 677 aa, Artificial Sequence; identical to SEQ ID NO: 187
  Synthetic

SEQ ID NO: 227 - protein, 677 aa, Artificial Sequence
  Synthetic
MASEKEIRRERFLNVFPKLVEELNASLLAYGMPKEACDWYAHSLNYNTPGGKLNRGLSVVDTYAILSNKTVEQLGQEEYEKVAILGWCIELLQAYWLVADDMMDKSITRRGQPCWYKVPEVGEIAIWDAFMLEAAIYKLLKSHFRNEKYYIDITELFHEVTFQTELGQLMDLITAPEDKVDLSKFSLKKHSFIVTFKTAYYSFYLPVALAMYVAGITDEKDLKQARDVLIPLGEYFQIQDDYLDCFGTPEQIGKIGTDIQDNKCSWVINKALELASAEQRKTLDENYGKKDSVAEAKCKKIFNDLKIEQLYHEYEESIAKDLKAKISQVDESRGFKADVLTAFLNKVYKRSKGSGSAGSDQIEGSPHHESDNSIATKILNFGHTCWKLQRPYVVKGMISIACGLFGRELLHNTNLISWSLMFKAFFALVPILSFNFFAAIMNQIYDVDIDRINKPDLPLVSGEMSIETAWILSIIVALTGLIVTIKMKGGPLFVFIYIFGIFAGFAYSVPPIRWKQYPFTNFLITISSHVGLAFTSYYASRAALGLPFELRPSFSFIIAFMTVMGMTIAFAKDISDIEGDAKYGVSTVATKLGARNMTRVVSGVLLLNYLVSISAGIIWPQAFNSNIMILSHAILAFCLIFQTRELALANYASAPSRQFFEFIWLLYYAEYLVYVFI

SEQ ID NO: 228 - protein, 676 aa, Artificial Sequence
  Synthetic
MASEKEIRRERFLNVFPKLVEELNASLLAYGMPKEACDWYAHSLNYNTPGGKLNRGLSVVDTYAILSNKTVEQLGQEEYEKVAILGWCIELLQAYWLVADDMMDKSITRRGQPCWYKVPEVGEIAIWDAFMLEAAIYKLLKSHFRNEKYYIDITELFHEVTFQTELGQLMDLITAPEDKVDLSKFSLKKHSFIVTFKTAYYSFYLPVALAMYVAGITDEKDLKQARDVLIPLGEYFQIQDDYLDCFGTPEQIGKIGTDIQDNKCSWVINKALELASAEQRKTLDENYGKKDSVAEAKCKKIFNDLKIEQLYHEYEESIAKDLKAKISQVDESRGFKADVLTAFLNKVYKRSKGSGSAGSDQIEGSPHHESDNSIATKILNFGHTCWKLQRPYVVKGMISIACGLFGRELFHNTNLLSWSLMLKAFSSLMVILSFNFFAAIMNQIYDVDIDRINKPDLPLVSGEMSIETAWILSIIVALTGLILTIKLNCGPLFISLYCVSIFAGFAYSVPPIRWKQYPFTNFLITISSHVGVNFTCYYASRAAFGLPFEMSPPFTFILAFMTVMGMTIAFAKDISDIEGDAKYGVSTVATKLGARNMTFVVSGVLLLTYVSAILAAIIWPFLWSKVVTVLGHTILASILWTNAKSVDLSSKAAITSFYMFIWKLFYAEYLLIPLVR

SEQ ID NO: 229 - protein, 677 aa, Artificial Sequence
  Synthetic
MASEKEIRRERFLNVFPKLVEELNASLLAYGMPKEACDWYAHSLNYNTPGGKLNRGLSVVDTYAILSNKTVEQLGQEEYEKVAILGWCIELLQAYWLVADDMMDKSITRRGQPCWYKVPEVGEIAIWDAFMLEAAIYKLLKSHFRNEKYYIDITELFHEVTFQTELGQLMDLITAPEDKVDLSKFSLKKHSFIVTFKTAYYSFYLPVALAMYVAGITDEKDLKQARDVLIPLGEYFQIQDDYLDCFGTPEQIGKIGTDIQDNKCSWVINKALELASAEQRKTLDENYGKKDSVAEAKCKKIFNDLKIEQLYHEYEESIAKDLKAKISQVDESRGFKADVLTAFLNKVYKRSKGSGSAGSDQIEGSPHHESDNSIATKILNFGHTCWKLQRPYVVKGLISIACGLFGRELFHNTNLLSWSLMLKAFSSLMVILSFNFFAAAMNQIYDVDIDRINKPDLPLVSGEMSIETAWILSIIVALTGLILTIKLNCGPLFISLYCVSIFAGFAYSVPPIRWKRYPFTNFLITISSHVGVNFTCYYASRAAFGLPFEMSPPFTFILAFMTVMGMTIAFAKDISDIEGDAKYGVSTVATKLGARNMTFVVSGVLLLTYVSAILAAIIWPQAFKSNVMLLSHAILAFCLIFQTRELALANYASAPSRQFFEFIWKLHYAEYLVYVFI

SEQ ID NO: 230 - protein, 677 aa, Artificial Sequence
  Synthetic
MASEKEIRRERFLNVFPKLVEELNASLLAYGMPKEACDWYAHSLNYNTPGGKLNRGLSVVDTYAILSNKTVEQLGQEEYEKVAILGWCIELLQAYWLVADDMMDKSITRRGQPCWYKVPEVGEIAIWDAFMLEAAIYKLLKSHFRNEKYYIDITELFHEVTFQTELGQLMDLITAPEDKVDLSKFSLKKHSFIVTFKTAYYSFYLPVALAMYVAGITDEKDLKQARDVLIPLGEYFQIQDDYLDCFGTPEQIGKIGTDIQDNKCSWVINKALELASAEQRKTLDENYGKKDSVAEAKCKKIFNDLKIEQLYHEYEESIAKDLKAKISQVDESRGFKADVLTAFLNKVYKRSKGSGSAGSDQIEGSPHHESDNSIATKILNFGHTFWKLQRPYVVKGLISIACGLFGKELLHNTNLISWSLMFKAFFALVPILSFNFFAAAVNQIYDVEIDRINKPDLPLVSGEMSIETAWILSIIVALTGLIVTIKMKGGPLFVFIYIFGLFAGFAYSVPPIRWKQYPFTNFLITISSHVGLAFTSYYASRAALGLPFELRPSFSFIIAFMTVMGMTIAFAKDISDIEGDAKYGVRTVATKLGARNMTFVVSGVLLLNYLVSILAGIIWPQAFNSNVMILSHAILAFCLIFRTRELALANYASAPSRQFFEFIWRLYYAEYLVYVFI

SEQ ID NO: 231 - protein, 677 aa, Artificial Sequence
  Synthetic
MASEKEIRRERFLNVFPKLVEELNASLLAYGMPKEACDWYAHSLNYNTPGGKLNRGLSVVDTYAILSNKTVEQLGQEEYEKVAILGWCIELLQAYWLVADDMMDKSITRRGQPCWYKVPEVGEIAIWDAFMLEAAIYKLLKSHFRNEKYYIDITELFHEVTFQTELGQLMDLITAPEDKVDLSKFSLKKHSFIVTFKTAYYSFYLPVALAMYVAGITDEKDLKQARDVLIPLGEYFQIQDDYLDCFGTPEQIGKIGTDIQDNKCSWVINKALELASAEQRKTLDENYGKKDSVAEAKCKKIFNDLKIEQLYHEYEESIAKDLKAKISQVDESRGFKADVLTAFLNKVYKRSKGSGSAGSDQIEGSPHHESDNSIATKILNFGHTCWKLQRPYVVKGMISIACGLFGRELFHNTNLLSWSLMLKAFSSLMVILSFNFFAASMNQIYDVDIDRINKPDLPLVSGEMSIETAWILSIIVALTGLILTIKLNCGPLFISLYCVSIFAGFAYSVPPIRWKQYPFTNFLITISSHVGVNFTCYYASRAAFGLPFEMSPPFTFILAFMTVMGMTIAFAKDISDIEGDAKYGVRTVATKLGARNMTFVVSGVLLLTYVSAILAAIIWPQAFKSNVMLLSHAILAFCLIFRTRELALANYASAPSRQFFEFIWKLHYAEYLVYVFI

SEQ ID NO: 232 - protein, 677 aa, Artificial Sequence
  Synthetic
MASEKEIRRERFLNVFPKLVEELNASLLAYGMPKEACDWYAHSLNYNTPGGKLNRGLSVVDTYAILSNKTVEQLGQEEYEKVAILGWCIELLQAYWLVADDMMDKSITRRGQPCWYKVPEVGEIAIWDAFMLEAAIYKLLKSHFRNEKYYIDITELFHEVTFQTELGQLMDLITAPEDKVDLSKFSLKKHSFIVTFKTAYYSFYLPVALAMYVAGITDEKDLKQARDVLIPLGEYFQIQDDYLDCFGTPEQIGKIGTDIQDNKCSWVINKALELASAEQRKTLDENYGKKDSVAEAKCKKIFNDLKIEQLYHEYEESIAKDLKAKISQVDESRGFKADVLTAFLNKVYKRSKGSGSAGSDQIEGSPHHESDNSIATKILNFGHTCWKLQRPYVVKGLISIACGLFGRELFHNTNLLSWSLMLKAFSSLMVILSFNFFAAAMNQIYDVDIDRINKPDLPLVSGEMSIETAWILSIIVALTGLILTIKLNCGPLFISLYCVSIFAGFAYSVPPIRWKQYPFTNFLITISSHVGVNFTCYYASRAAFGLPFEMSPPFTFILAFMTVMGMTIAFAKDISDIEGDAKYGVSTVATKLGARNMTFVVSGVLLLTYVSAILAAIIWPQAFKSNVMLLSHAILAFCLIFRTRELALANYASAPSRQFFEFIWKLHYAEYLVYVFI

SEQ ID NO: 233 - protein, 676 aa, Artificial Sequence
  Synthetic
MASEKEIRRERFLNVFPKLVEELNASLLAYGMPKEACDWYAHSLNYNTPGGKLNRGLSVVDTYAILSNKTVEQLGQEEYEKVAILGWCIELLQAYWLVADDMMDKSITRRGQPCWYKVPEVGEIAIWDAFMLEAAIYKLLKSHFRNEKYYIDITELFHEVTFQTELGQLMDLITAPEDKVDLSKFSLKKHSFIVTFKTAYYSFYLPVALAMYVAGITDEKDLKQARDVLIPLGEYFQIQDDYLDCFGTPEQIGKIGTDIQDNKCSWVINKALELASAEQRKTLDENYGKKDSVAEAKCKKIFNDLKIEQLYHEYEESIAKDLKAKISQVDESRGFKADVLTAFLNKVYKRSKGSGSAGSDQIEGSPHHESDNSIATKILNFGHTCWKLQRPYVVKGMISIACGLFGRELFHNTNLLSWSLMLKAFSSLMVILSFNFFAAIMNQIYDVDIDRINKPDLPLVSGEMSIETAWILSIIVALTGLILTIKLNCGPLFISLYCVSIFAGFAYSVPPIRWKQYPFTNFLITISSHVGVNFTCYYASRAAFGLPFEMSPPFTFILAFMTVMGMTIAFAKDISDIEGDAKYGVSTVATKLGARNMTFVVSGVLLLNYLVSISIGIIWPFLWSKVVTVLGHTILASILWTNAKSVDLSSKAAITSFYMFIWKLFYAEYLLIPLVR

SEQ ID NO: 234 - protein, 677 aa, Artificial Sequence
  Synthetic
MASEKEIRRERFLNVFPKLVEELNASLLAYGMPKEACDWYAHSLNYNTPGGKLNRGLSVVDTYAILSNKTVEQLGQEEYEKVAILGWCIELLQAYWLVADDMMDKSITRRGQPCWYKVPEVGEIAIWDAFMLEAAIYKLLKSHFRNEKYYIDITELFHEVTFQTELGQLMDLITAPEDKVDLSKFSLKKHSFIVTFKTAYYSFYLPVALAMYVAGITDEKDLKQARDVLIPLGEYFQIQDDYLDCFGTPEQIGKIGTDIQDNKCSWVINKALELASAEQRKTLDENYGKKDSVAEAKCKKIFNDLKIEQLYHEYEESIAKDLKAKISQVDESRGFKADVLTAFLNKVYKRSKGSGSAGSDQIEGSPHHESDNSIATKILNFGHTFWKLQRPYVVKGLISIACGLFGKELLHNTNLISWSLMFKAFFALVPILSFNFFAAAMNQIYDVEIDRINKPDLPLVSGEMSIETAWILSIIVALTGLIVTIKMKGGPLFVFIYIFGLFAGFAYSVPPIRWKQYPFTNFLITISSHVGLAFTSYYASRAALGLPFELRPSFSFIIAFMTVMGMTIAFAKDISDIEGDAKYGVRTVATKLGARNMTRVVSGVLLLNYLVSILAGIIWPQAFNSNVMILSHAILAFCLIFRTRELALANYASAPSRQFFEFIWRLYYAEYLVYVFI

SEQ ID NO: 235 - protein, 677 aa, Artificial Sequence
  Synthetic
MASEKEIRRERFLNVFPKLVEELNASLLAYGMPKEACDWYAHSLNYNTPGGKLNRGLSVVDTYAILSNKTVEQLGQEEYEKVAILGWCIELLQAYWLVADDMMDKSITRRGQPCWYKVPEVGEIAIWDAFMLEAAIYKLLKSHFRNEKYYIDITELFHEVTFQTELGQLMDLITAPEDKVDLSKFSLKKHSFIVTFKTAYYSFYLPVALAMYVAGITDEKDLKQARDVLIPLGEYFQIQDDYLDCFGTPEQIGKIGTDIQDNKCSWVINKALELASAEQRKTLDENYGKKDSVAEAKCKKIFNDLKIEQLYHEYEESIAKDLKAKISQVDESRGFKADVLTAFLNKVYKRSKGSGSAGSDQIEGSPHHESDNSIATKILNFGHTCWKLQRPYVVKGMISIACGLFGRELFHNTNLLSWSLMLKAFSSLMVILSFNFFAASMNQIYDVDIDRINKPDLPLVSGEMSIETAWILSIIVALTGLILTIKLNCGPLFISLYCVSIFAGFAYSVPPIRWKRYPFTNFLITISSHVGVNFTCYYASRAAFGLPFEMSPPFTFILAFMTVMGMTIAFAKDISDIEGDAKYGVSTVATKLGARNMTFVVSGVLLLTYVSAILAAIIWPQAFKSNVMLLSHAILAFCLIFRTRELALANYASAPSRQFFEFIWKLHYAEYLVYVFI

SEQ ID NO: 236 - protein, 677 aa, Artificial Sequence
  Synthetic
MASEKEIRRERFLNVFPKLVEELNASLLAYGMPKEACDWYAHSLNYNTPGGKLNRGLSVVDTYAILSNKTVEQLGQEEYEKVAILGWCIELLQAYWLVADDMMDKSITRRGQPCWYKVPEVGEIAIWDAFMLEAAIYKLLKSHFRNEKYYIDITELFHEVTFQTELGQLMDLITAPEDKVDLSKFSLKKHSFIVTFKTAYYSFYLPVALAMYVAGITDEKDLKQARDVLIPLGEYFQIQDDYLDCFGTPEQIGKIGTDIQDNKCSWVINKALELASAEQRKTLDENYGKKDSVAEAKCKKIFNDLKIEQLYHEYEESIAKDLKAKISQVDESRGFKADVLTAFLNKVYKRSKGSGSAGSDQIEGSPHHESDNSIATKILNFGHTCWKLQRPYVVKGMISIACGLFGRELFHNTNLLSWSLMLKAFSSLMVILSFNFFAAIMNQIYDVDIDRINKPDLPLVSGEMSIETAWILSIIVALTGLILTIKLNCGPLFISLYCVSLFAGFAYSVPPIRWKQYPFTNFLITISSHVGVNFTCYYASRAAFGLPFEMSPPFTFILAFMTVMGMTIAFAKDISDIEGDAKYGVRTVATKLGARNMTFVVSGVLLLTYVSAILAAIIWPQAFKSNVMLLSHAILAFCLIFQTRELALANYASAPSRQFFEFIWKLHYAEYLVYVFI

SEQ ID NO: 237 - protein, 676 aa, Artificial Sequence
  Synthetic
MASEKEIRRERFLNVFPKLVEELNASLLAYGMPKEACDWYAHSLNYNTPGGKLNRGLSVVDTYAILSNKTVEQLGQEEYEKVAILGWCIELLQAYWLVADDMMDKSITRRGQPCWYKVPEVGEIAIWDAFMLEAAIYKLLKSHFRNEKYYIDITELFHEVTFQTELGQLMDLITAPEDKVDLSKFSLKKHSFIVTFKTAYYSFYLPVALAMYVAGITDEKDLKQARDVLIPLGEYFQIQDDYLDCFGTPEQIGKIGTDIQDNKCSWVINKALELASAEQRKTLDENYGKKDSVAEAKCKKIFNDLKIEQLYHEYEESIAKDLKAKISQVDESRGFKADVLTAFLNKVYKRSKGSGSAGSDQIEGSPHHESDNSIATKILNFGHTCWKLQRPYVVKGMISIACGLFGRELFHNTNLLSWSLMLKAFSSLMVILSFNFFAAIMNQIYDVDIDRINKPDLPLVSGEMSIETAWILSIIVALTGLILTIKLNCGPLFISLYCVSIFAGFAYSVPPIRWKQYPFTNFLITISSHVGVNFTCYYASRAAFGLPFEMSPPFTFILAFMTVMGMTIAFAKDISDIEGDAKYGVSTVATKLGARNMTFVVSGVLLLNYLVSISIGIIWPQVFKSNIMILSHTILASILWTNAKSVDLSSKAAITSFYMFIWKLFYAEYLLIPLVR

SEQ ID NO: 238 - protein, 677 aa, Artificial Sequence
  Synthetic
MASEKEIRRERFLNVFPKLVEELNASLLAYGMPKEACDWYAHSLNYNTPGGKLNRGLSVVDTYAILSNKTVEQLGQEEYEKVAILGWCIELLQAYWLVADDMMDKSITRRGQPCWYKVPEVGEIAIWDAFMLEAAIYKLLKSHFRNEKYYIDITELFHEVTFQTELGQLMDLITAPEDKVDLSKFSLKKHSFIVTFKTAYYSFYLPVALAMYVAGITDEKDLKQARDVLIPLGEYFQIQDDYLDCFGTPEQIGKIGTDIQDNKCSWVINKALELASAEQRKTLDENYGKKDSVAEAKCKKIFNDLKIEQLYHEYEESIAKDLKAKISQVDESRGFKADVLTAFLNKVYKRSKGSGSAGSDQIEGSPHHESDNSIATKILNFGHTCWKLQRPYVVKGLISIACGLFGRELFHNTNLLSWSLMLKAFSSLMVILSFNFFAAIMNQIYDVDIDRINKPDLPLVSGEMSIETAWILSIIVALTGLILTIKLNCGPLFISLYCVSLFAGFAYSVPPIRWKQYPFTNFLITISSHVGVNFTCYYASRAAFGLPFEMSPPFTFILAFMTVMGMTIAFAKDISDIEGDAKYGVRTVATKLGARNMTFVVSGVLLLTYVSAILAAIIWPQAFKSNVMLLSHAILAFCLIFQTRELALANYASAPSRQFFEFIWKLHYAEYLVYVFI

SEQ ID NO: 239 - protein, 677 aa, Artificial Sequence
  Synthetic
MASEKEIRRERFLNVFPKLVEELNASLLAYGMPKEACDWYAHSLNYNTPGGKLNRGLSVVDTYAILSNKTVEQLGQEEYEKVAILGWCIELLQAYWLVADDMMDKSITRRGQPCWYKVPEVGEIAIWDAFMLEAAIYKLLKSHFRNEKYYIDITELFHEVTFQTELGQLMDLITAPEDKVDLSKFSLKKHSFIVTFKTAYYSFYLPVALAMYVAGITDEKDLKQARDVLIPLGEYFQIQDDYLDCFGTPEQIGKIGTDIQDNKCSWVINKALELASAEQRKTLDENYGKKDSVAEAKCKKIFNDLKIEQLYHEYEESIAKDLKAKISQVDESRGFKADVLTAFLNKVYKRSKGSGSAGSDQIEGSPHHESDNSIATKILNFGHTFWKLQRPYVVKGLISIACGLFGKELLHNTNLISWSLMFKAFFALVPILSFNFFAAAVNQIYDVDIDRINKPDLPLVSGEMSIETAWILSIIVALTGLIVTIKMKGGPLFVFIYIFGLFAGFAYSVPPIRWKQYPFTNFLITISSHVGLAFTSYYASRAALGLPFELRPSFSFIIAFMTVMGMTIAFAKDISDIEGDAKYGVRTVATKLGARNMTRVVSGVLLLNYLVSILAGIIWPQAFNSNVMILSHAILAFCLIFRTRELALANYASAPSRQFFEFIWRLYYAEYLVYVFI

SEQ ID NO: 240 - protein, 677 aa, Artificial Sequence
  Synthetic
MASEKEIRRERFLNVFPKLVEELNASLLAYGMPKEACDWYAHSLNYNTPGGKLNRGLSVVDTYAILSNKTVEQLGQEEYEKVAILGWCIELLQAYWLVADDMMDKSITRRGQPCWYKVPEVGEIAIWDAFMLEAAIYKLLKSHFRNEKYYIDITELFHEVTFQTELGQLMDLITAPEDKVDLSKFSLKKHSFIVTFKTAYYSFYLPVALAMYVAGITDEKDLKQARDVLIPLGEYFQIQDDYLDCFGTPEQIGKIGTDIQDNKCSWVINKALELASAEQRKTLDENYGKKDSVAEAKCKKIFNDLKIEQLYHEYEESIAKDLKAKISQVDESRGFKADVLTAFLNKVYKRSKGSGSAGSDQIEGSPHHESDNSIATKILNFGHTFWKLQRPYVVKGMISIACGLFGKELLHNTNLISWSLMFKAFFALVPILSFNFFAASVNQIYDVEIDRINKPDLPLVSGEMSIETAWILSIIVALTGLIVTIKMKGGPLFVFIYIFGLFAGFAYSVPPIRWKQYPFTNFLITISSHVGLAFTSYYASRAALGLPFELRPSFSFIIAFMTVMGMTIAFAKDISDIEGDAKYGVRTVATKLGARNMTRVVSGVLLLNYLVSILAGIIWPQAFNSNVMILSHAILAFCLIFRTRELALANYASAPSRQFFEFIWNLYYAEYLVYVFI

SEQ ID NO: 241 - protein, 677 aa, Artificial Sequence
  Synthetic
MASEKEIRRERFLNVFPKLVEELNASLLAYGMPKEACDWYAHSLNYNTPGGKLNRGLSVVDTYAILSNKTVEQLGQEEYEKVAILGWCIELLQAYWLVADDMMDKSITRRGQPCWYKVPEVGEIAIWDAFMLEAAIYKLLKSHFRNEKYYIDITELFHEVTFQTELGQLMDLITAPEDKVDLSKFSLKKHSFIVTFKTAYYSFYLPVALAMYVAGITDEKDLKQARDVLIPLGEYFQIQDDYLDCFGTPEQIGKIGTDIQDNKCSWVINKALELASAEQRKTLDENYGKKDSVAEAKCKKIFNDLKIEQLYHEYEESIAKDLKAKISQVDESRGFKADVLTAFLNKVYKRSKGSGSAGSDQIEGSPHHESDNSIATKILNFGHTCWKLQRPYVVKGLISIACGLFGRELFHNTNLLSWSLMLKAFSSLMVILSFNFFAAIMNQIYDVDIDRINKPDLPLVSGEMSIETAWILSIIVALTGLILTIKLNCGPLFISLYCVSLFAGFAYSVPPIRWKRYPFTNFLITISSHVGVNFTCYYASRAAFGLPFEMSPPFTFILAFMTVMGMTIAFAKDISDIEGDAKYGVSTVATKLGARNMTFVVSGVLLLTYVSAILAAIIWPQAFKSNVMLLSHAILAFCLIFQTRELALANYASAPSRQFFEFIWKLHYAEYLVYVFI

SEQ ID NO: 242 - protein, 677 aa, Artificial Sequence
  Synthetic
MASEKEIRRERFLNVFPKLVEELNASLLAYGMPKEACDWYAHSLNYNTPGGKLNRGLSVVDTYAILSNKTVEQLGQEEYEKVAILGWCIELLQAYWLVADDMMDKSITRRGQPCWYKVPEVGEIAIWDAFMLEAAIYKLLKSHFRNEKYYIDITELFHEVTFQTELGQLMDLITAPEDKVDLSKFSLKKHSFIVTFKTAYYSFYLPVALAMYVAGITDEKDLKQARDVLIPLGEYFQIQDDYLDCFGTPEQIGKIGTDIQDNKCSWVINKALELASAEQRKTLDENYGKKDSVAEAKCKKIFNDLKIEQLYHEYEESIAKDLKAKISQVDESRGFKADVLTAFLNKVYKRSKGSGSAGSDQIEGSPHHESDNSIATKILNFGHTCWKLQRPYVVKGMISIACGLFGKELLHNTNLISWSLMFKAFFALVPILSFNFFAAIMNQIYDVDIDRINKPDLPLVSGEMSIETAWILSIIVALTGLIVTIKMKGGPLFVFIYIFGIFAGFAYSVPPIRWKQYPFTNFLITISSHVGLAFTSYYASRAALGLPFELRPSFSFIIAFMTVMGMTIAFAKDISDIEGDAKYGVSTLASKYGSRNLTLFCSGIVLLSYVAAILAGIIWPQAFNSNVMLLSHAILAFWLILQTRDFALTNYDPEAGRRFYEFMWKLYYAEYLVYVFI

SEQ ID NO: 243 - protein, 677 aa, Artificial Sequence
  Synthetic
MASEKEIRRERFLNVFPKLVEELNASLLAYGMPKEACDWYAHSLNYNTPGGKLNRGLSVVDTYAILSNKTVEQLGQEEYEKVAILGWCIELLQAYWLVADDMMDKSITRRGQPCWYKVPEVGEIAIWDAFMLEAAIYKLLKSHFRNEKYYIDITELFHEVTFQTELGQLMDLITAPEDKVDLSKFSLKKHSFIVTFKTAYYSFYLPVALAMYVAGITDEKDLKQARDVLIPLGEYFQIQDDYLDCFGTPEQIGKIGTDIQDNKCSWVINKALELASAEQRKTLDENYGKKDSVAEAKCKKIFNDLKIEQLYHEYEESIAKDLKAKISQVDESRGFKADVLTAFLNKVYKRSKGSGSAGSDQIEGSPHHESDNSIATKILNFGHTCWKLQRPYVVKGMISIACGLFGRELFHNTNLLSWSLMLKAFSSLMVILSFNFFAAIMNQIYDVDIDRINKPDLPLVSGEMSIETAWILSIIVALTGLILTIKLNCGPLFISLYCVSLFAGFAYSVPPIRWKRYPFTNFLITISSHVGVNFTCYYASRAAFGLPFEMSPPFTFILAFMTVMGMTIAFAKDISDIEGDAKYGVSTVATKLGARNMTFVVSGVLLLTYVSAILAAIIWPQAFKSNVMLLSHAILAFCLIFQTRELALANYASAPSRQFFEFIWKLHYAEYLVYVFI

SEQ ID NO: 244 - protein, 677 aa, Artificial Sequence
  Synthetic
MASEKEIRRERFLNVFPKLVEELNASLLAYGMPKEACDWYAHSLNYNTPGGKLNRGLSVVDTYAILSNKTVEQLGQEEYEKVAILGWCIELLQAYWLVADDMMDKSITRRGQPCWYKVPEVGEIAIWDAFMLEAAIYKLLKSHFRNEKYYIDITELFHEVTFQTELGQLMDLITAPEDKVDLSKFSLKKHSFIVTFKTAYYSFYLPVALAMYVAGITDEKDLKQARDVLIPLGEYFQIQDDYLDCFGTPEQIGKIGTDIQDNKCSWVINKALELASAEQRKTLDENYGKKDSVAEAKCKKIFNDLKIEQLYHEYEESIAKDLKAKISQVDESRGFKADVLTAFLNKVYKRSKGSGSAGSDQIEGSPHHESDNSIATKILNFGHTFWKLQRPYVVKGLISIACGLFGKELLHNTNLISWSLMFKAFFALVPILSFNFFAAIVNQIYDVEIDRINKPDLPLVSGEMSIETAWILSIIVALTGLIVTIKMKGGPLFVFIYIFGLFAGFAYSVPPIRWKQYPFTNFLITISSHVGLAFTSYYASRAALGLPFELRPSFSFIIAFMTVMGMTIAFAKDISDIEGDAKYGVRTVATKLGARNMTRVVSGVLLLNYLVSILAGIIWPQAFNSNVMILSHAILAFCLIFRTRELALANYASAPSRQFFEFIWNLYYAEYLVYVFI

SEQ ID NO: 245 - protein, 677 aa, Artificial Sequence
  Synthetic
MASEKEIRRERFLNVFPKLVEELNASLLAYGMPKEACDWYAHSLNYNTPGGKLNRGLSVVDTYAILSNKTVEQLGQEEYEKVAILGWCIELLQAYWLVADDMMDKSITRRGQPCWYKVPEVGEIAIWDAFMLEAAIYKLLKSHFRNEKYYIDITELFHEVTFQTELGQLMDLITAPEDKVDLSKFSLKKHSFIVTFKTAYYSFYLPVALAMYVAGITDEKDLKQARDVLIPLGEYFQIQDDYLDCFGTPEQIGKIGTDIQDNKCSWVINKALELASAEQRKTLDENYGKKDSVAEAKCKKIFNDLKIEQLYHEYEESIAKDLKAKISQVDESRGFKADVLTAFLNKVYKRSKGSGSAGSDQIEGSPHHESDNSIATKILNFGHTCWKLQRPYVVKGLISIACGLFGRELFHNTNLLSWSLMLKAFSSLMVILSFNFFAAIMNQIYDVDIDRINKPDLPLVSGEMSIETAWILSIIVALTGLILTIKLNCGPLFISLYCVSLFAGFAYSVPPIRWKQYPFTNFLITISSHVGVNFTCYYASRAAFGLPFEMSPPFTFILAFMTVMGMTIAFAKDISDIEGDAKYGVSTVATKLGARNMTFVVSGVLLLTYVSAILAAIIWPQAFKSNVMLLSHAILAFCLIFRTRELALANYASAPSRQFFEFIWKLHYAEYLVYVFI

SEQ ID NO: 246 - protein, 676 aa, Artificial Sequence
  Synthetic
MASEKEIRRERFLNVFPKLVEELNASLLAYGMPKEACDWYAHSLNYNTPGGKLNRGLSVVDTYAILSNKTVEQLGQEEYEKVAILGWCIELLQAYWLVADDMMDKSITRRGQPCWYKVPEVGEIAIWDAFMLEAAIYKLLKSHFRNEKYYIDITELFHEVTFQTELGQLMDLITAPEDKVDLSKFSLKKHSFIVTFKTAYYSFYLPVALAMYVAGITDEKDLKQARDVLIPLGEYFQIQDDYLDCFGTPEQIGKIGTDIQDNKCSWVINKALELASAEQRKTLDENYGKKDSVAEAKCKKIFNDLKIEQLYHEYEESIAKDLKAKISQVDESRGFKADVLTAFLNKVYKRSKGSGSAGSDQIEGSPHHESDNSIATKILNFGHTCWKLQRPYVVKGMISIACGLFGKELLHNTNLISWSLMFKAFFALVPILSFNFFAAIMNQIYDVDIDRINKPDLPLVSGEMSIETAWILSIIVALTGLIVTIKMKGGPLFVFIYIFGIFAGFAYSVPPIRWKQYPFTNFLITISSHVGLAFTSYYASRAALGLPFELRPSFSFIIAFMTVMGMTIAFAKDISDIEGDAKYGVSTVATKLGARNMTFVVSGVLLLNYLVSISIGIIWPQVFKSNITVLGHTILASILWTNAKSVDLSSKAAITSFYMFIWKLFYAEYLLIPLVR

SEQ ID NO: 247 - protein, 677 aa, Artificial Sequence
  Synthetic
MASEKEIRRERFLNVFPKLVEELNASLLAYGMPKEACDWYAHSLNYNTPGGKLNRGLSVVDTYAILSNKTVEQLGQEEYEKVAILGWCIELLQAYWLVADDMMDKSITRRGQPCWYKVPEVGEIAIWDAFMLEAAIYKLLKSHFRNEKYYIDITELFHEVTFQTELGQLMDLITAPEDKVDLSKFSLKKHSFIVTFKTAYYSFYLPVALAMYVAGITDEKDLKQARDVLIPLGEYFQIQDDYLDCFGTPEQIGKIGTDIQDNKCSWVINKALELASAEQRKTLDENYGKKDSVAEAKCKKIFNDLKIEQLYHEYEESIAKDLKAKISQVDESRGFKADVLTAFLNKVYKRSKGSGSAGSDQIEGSPHHESDNSIATKILNFGHTCWKLQRPYVVKGMISIACGLFGRELFHNTNLLSWSLMLKAFSSLMVILSFNFFAAIMNQIYDVDIDRINKPDLPLVSGEMSIETAWILSIIVALTGLILTIKLNCGPLFISLYCVSLFAGFAYSVPPIRWKQYPFTNFLITISSHVGVNFTCYYASRAAFGLPFEMSPPFTFILAFMTVMGMTIAFAKDISDIEGDAKYGVSTVATKLGARNMTFVVSGVLLLTYVSAILAAIIWPQAFKSNVMLLSHAILAFCLIFRTRELALANYASAPSRQFFEFIWKLHYAEYLVYVFI

SEQ ID NO: 248 - protein, 677 aa, Artificial Sequence
  Synthetic
MASEKEIRRERFLNVFPKLVEELNASLLAYGMPKEACDWYAHSLNYNTPGGKLNRGLSVVDTYAILSNKTVEQLGQEEYEKVAILGWCIELLQAYWLVADDMMDKSITRRGQPCWYKVPEVGEIAIWDAFMLEAAIYKLLKSHFRNEKYYIDITELFHEVTFQTELGQLMDLITAPEDKVDLSKFSLKKHSFIVTFKTAYYSFYLPVALAMYVAGITDEKDLKQARDVLIPLGEYFQIQDDYLDCFGTPEQIGKIGTDIQDNKCSWVINKALELASAEQRKTLDENYGKKDSVAEAKCKKIFNDLKIEQLYHEYEESIAKDLKAKISQVDESRGFKADVLTAFLNKVYKRSKGSGSAGSDQIEGSPHHESDNSIATKILNFGHTCWKLQRPYVVKGMISIACGLFGRELFHNTNLLSWSLMLKAFSSLMVILSFNFFAAIMNQIYDVDIDRINKPDLPLVSGEMSIETAWILSIIVALTGLILTIKLNCGPLFISLYCVSIFAGFAYSVPPIRWKQYPFTNFLITISSHVGVNFTCYYASRAAFGLPFEMSPPFTFILAFMTVMGMTIAFAKDISDIEGDAKYGVRTVATKLGARNMTFVVSGVLLLTYVSAILAAIIWPQAFKSNVMLLSHAILAFCLIFRTRELALANYASAPSRQFFEFIWKLHYAEYLVYVFI

SEQ ID NO: 249 - protein, 677 aa, Artificial Sequence
  Synthetic
MASEKEIRRERFLNVFPKLVEELNASLLAYGMPKEACDWYAHSLNYNTPGGKLNRGLSVVDTYAILSNKTVEQLGQEEYEKVAILGWCIELLQAYWLVADDMMDKSITRRGQPCWYKVPEVGEIAIWDAFMLEAAIYKLLKSHFRNEKYYIDITELFHEVTFQTELGQLMDLITAPEDKVDLSKFSLKKHSFIVTFKTAYYSFYLPVALAMYVAGITDEKDLKQARDVLIPLGEYFQIQDDYLDCFGTPEQIGKIGTDIQDNKCSWVINKALELASAEQRKTLDENYGKKDSVAEAKCKKIFNDLKIEQLYHEYEESIAKDLKAKISQVDESRGFKADVLTAFLNKVYKRSKGSGSAGSDQIEGSPHHESDNSIATKILNFGHTFWKLQRPYVVKGLISIACGLFGKELLHNTNLISWSLMFKAFFALVPILSFNFFAASVNQIYDVEIDRINKPDLPLVSGEMSIETAWILSIIVALTGLIVTIKMKGGPLFVFIYIFGLFAGFAYSVPPIRWKQYPFTNFLITISSHVGLAFTSYYASRAALGLPFELRPSFSFIIAFMTVMGMTIAFAKDISDIEGDAKYGVRTVATKLGARNMTRVVSGVLLLNYLVSILAGIIWPQAFNSNVMILSHAILAFCLIFQTRELALANYASAPSRQFFEFIWNLYYAEYLVYVFI

SEQ ID NO: 250 - protein, 677 aa, Artificial Sequence
  Synthetic
MASEKEIRRERFLNVFPKLVEELNASLLAYGMPKEACDWYAHSLNYNTPGGKLNRGLSVVDTYAILSNKTVEQLGQEEYEKVAILGWCIELLQAYWLVADDMMDKSITRRGQPCWYKVPEVGEIAIWDAFMLEAAIYKLLKSHFRNEKYYIDITELFHEVTFQTELGQLMDLITAPEDKVDLSKFSLKKHSFIVTFKTAYYSFYLPVALAMYVAGITDEKDLKQARDVLIPLGEYFQIQDDYLDCFGTPEQIGKIGTDIQDNKCSWVINKALELASAEQRKTLDENYGKKDSVAEAKCKKIFNDLKIEQLYHEYEESIAKDLKAKISQVDESRGFKADVLTAFLNKVYKRSKGSGSAGSDQIEGSPHHESDNSIATKILNFGHTCWKLQRPYVVKGLISIACGLFGRELFHNTNLLSWSLMLKAFSSLMVILSFNFFAAIMNQIYDVDIDRINKPDLPLVSGEMSIETAWILSIIVALTGLILTIKLNCGPLFISLYCVSIFAGFAYSVPPIRWKQYPFTNFLITISSHVGVNFTCYYASRAAFGLPFEMSPPFTFILAFMTVMGMTIAFAKDISDIEGDAKYGVRTVATKLGARNMTFVVSGVLLLTYVSAILAAIIWPQAFKSNVMLLSHAILAFCLIFRTRELALANYASAPSRQFFEFIWKLHYAEYLVYVFI

SEQ ID NO: 251 - protein, 676 aa, Artificial Sequence
  Synthetic
MASEKEIRRERFLNVFPKLVEELNASLLAYGMPKEACDWYAHSLNYNTPGGKLNRGLSVVDTYAILSNKTVEQLGQEEYEKVAILGWCIELLQAYWLVADDMMDKSITRRGQPCWYKVPEVGEIAIWDAFMLEAAIYKLLKSHFRNEKYYIDITELFHEVTFQTELGQLMDLITAPEDKVDLSKFSLKKHSFIVTFKTAYYSFYLPVALAMYVAGITDEKDLKQARDVLIPLGEYFQIQDDYLDCFGTPEQIGKIGTDIQDNKCSWVINKALELASAEQRKTLDENYGKKDSVAEAKCKKIFNDLKIEQLYHEYEESIAKDLKAKISQVDESRGFKADVLTAFLNKVYKRSKGSGSAGSDQIEGSPHHESDNSIATKILNFGHTCWKLQRPYVVKGMISIACGLFGKELLHNTNLISWSLMFKAFFALVPILSFNFFAAIMNQIYDVDIDRINKPDLPLVSGEMSIETAWILSIIVALTGLIVTIKMKGGPLFVFIYIFGIFAGFAYSVPPIRWKQYPFTNFLITISSHVGLAFTSYYASRAALGLPFELRPSFSFIIAFMTVMGMTIAFAKDISDIEGDAKYGVSTVATKLGARNMTFVVSGVLLLNYLVSILAGIIWPQAFNSNVTVLGHTILASILWTNAKSVDLSSKAAITSFYMFIWKLFYAEYLLIPLVR

SEQ ID NO: 252 - protein, 677 aa, Artificial Sequence
  Synthetic
MASEKEIRRERFLNVFPKLVEELNASLLAYGMPKEACDWYAHSLNYNTPGGKLNRGLSVVDTYAILSNKTVEQLGQEEYEKVAILGWCIELLQAYWLVADDMMDKSITRRGQPCWYKVPEVGEIAIWDAFMLEAAIYKLLKSHFRNEKYYIDITELFHEVTFQTELGQLMDLITAPEDKVDLSKFSLKKHSFIVTFKTAYYSFYLPVALAMYVAGITDEKDLKQARDVLIPLGEYFQIQDDYLDCFGTPEQIGKIGTDIQDNKCSWVINKALELASAEQRKTLDENYGKKDSVAEAKCKKIFNDLKIEQLYHEYEESIAKDLKAKISQVDESRGFKADVLTAFLNKVYKRSKGSGSAGSDQIEGSPHHESDNSIATKILNFGHTCWKLQRPYVVKGMISIACGLFGRELFHNTNLLSWSLMLKAFSSLMVILSFNFFAAIMNQIYDVDIDRINKPDLPLVSGEMSIETAWILSIIVALTGLILTIKLNCGPLFISLYCVSIFAGFAYSVPPIRWKRYPFTNFLITISSHVGVNFTCYYASRAAFGLPFEMSPPFTFILAFMTVMGMTIAFAKDISDIEGDAKYGVSTVATKLGARNMTFVVSGVLLLTYVSAILAAIIWPQAFKSNVMLLSHAILAFCLIFRTRELALANYASAPSRQFFEFIWKLHYAEYLVYVFI

SEQ ID NO: 253 - protein, 677 aa, Artificial Sequence
  Synthetic
MASEKEIRRERFLNVFPKLVEELNASLLAYGMPKEACDWYAHSLNYNTPGGKLNRGLSVVDTYAILSNKTVEQLGQEEYEKVAILGWCIELLQAYWLVADDMMDKSITRRGQPCWYKVPEVGEIAIWDAFMLEAAIYKLLKSHFRNEKYYIDITELFHEVTFQTELGQLMDLITAPEDKVDLSKFSLKKHSFIVTFKTAYYSFYLPVALAMYVAGITDEKDLKQARDVLIPLGEYFQIQDDYLDCFGTPEQIGKIGTDIQDNKCSWVINKALELASAEQRKTLDENYGKKDSVAEAKCKKIFNDLKIEQLYHEYEESIAKDLKAKISQVDESRGFKADVLTAFLNKVYKRSKGSGSAGSDQIEGSPHHESDNSIATKILNFGHTCWKLQRPYVVKGLISIACGLFGKELLHNTNLISWSLMFKAFFALVPILSFNFFAASVNQIYDVEIDRINKPDLPLVSGEMSIETAWILSIIVALTGLIVTIKMKGGPLFVFIYIFGLFAGFAYSVPPIRWKQYPFTNFLITISSHVGLAFTSYYASRAALGLPFELRPSFSFIIAFMTVMGMTIAFAKDISDIEGDAKYGVRTVATKLGARNMTRVVSGVLLLNYLVSILAGIIWPQAFNSNVMILSHAILAFCLIFRTRELALANYASAPSRQFFEFIWNLYYAEYLVYVFI

SEQ ID NO: 254 - protein, 677 aa, Artificial Sequence
  Synthetic
MASEKEIRRERFLNVFPKLVEELNASLLAYGMPKEACDWYAHSLNYNTPGGKLNRGLSVVDTYAILSNKTVEQLGQEEYEKVAILGWCIELLQAYWLVADDMMDKSITRRGQPCWYKVPEVGEIAIWDAFMLEAAIYKLLKSHFRNEKYYIDITELFHEVTFQTELGQLMDLITAPEDKVDLSKFSLKKHSFIVTFKTAYYSFYLPVALAMYVAGITDEKDLKQARDVLIPLGEYFQIQDDYLDCFGTPEQIGKIGTDIQDNKCSWVINKALELASAEQRKTLDENYGKKDSVAEAKCKKIFNDLKIEQLYHEYEESIAKDLKAKISQVDESRGFKADVLTAFLNKVYKRSKGSGSAGSDQIEGSPHHESDNSIATKILNFGHTCWKLQRPYVVKGLISIACGLFGRELFHNTNLLSWSLMLKAFSSLMVILSFNFFAAIMNQIYDVDIDRINKPDLPLVSGEMSIETAWILSIIVALTGLILTIKLNCGPLFISLYCVSIFAGFAYSVPPIRWKRYPFTNFLITISSHVGVNFTCYYASRAAFGLPFEMSPPFTFILAFMTVMGMTIAFAKDISDIEGDAKYGVSTVATKLGARNMTFVVSGVLLLTYVSAILAAIIWPQAFKSNVMLLSHAILAFCLIFRTRELALANYASAPSRQFFEFIWKLHYAEYLVYVFI

SEQ ID NO: 255 - protein, 676 aa, Artificial Sequence
  Synthetic
MASEKEIRRERFLNVFPKLVEELNASLLAYGMPKEACDWYAHSLNYNTPGGKLNRGLSVVDTYAILSNKTVEQLGQEEYEKVAILGWCIELLQAYWLVADDMMDKSITRRGQPCWYKVPEVGEIAIWDAFMLEAAIYKLLKSHFRNEKYYIDITELFHEVTFQTELGQLMDLITAPEDKVDLSKFSLKKHSFIVTFKTAYYSFYLPVALAMYVAGITDEKDLKQARDVLIPLGEYFQIQDDYLDCFGTPEQIGKIGTDIQDNKCSWVINKALELASAEQRKTLDENYGKKDSVAEAKCKKIFNDLKIEQLYHEYEESIAKDLKAKISQVDESRGFKADVLTAFLNKVYKRSKGSGSAGSDQIEGSPHHESDNSIATKILNFGHTCWKLQRPYVVKGMISIACGLFGKELLHNTNLISWSLMFKAFFALVPILSFNFFAAIMNQIYDVDIDRINKPDLPLVSGEMSIETAWILSIIVALTGLIVTIKMKGGPLFVFIYIFGIFAGFAYSVPPIRWKQYPFTNFLITISSHVGLAFTSYYASRAALGLPFELRPSFSFIIAFMTVMGMTIAFAKDISDIEGDAKYGVSTVATKLGARNMTFVVSGVLLLNYLVSILAGIIWPFLWSKVVTVLGHTILASILWTNAKSVDLSSKAAITSFYMFIWKLFYAEYLLIPLVR

SEQ ID NO: 256 - protein, 677 aa, Artificial Sequence
  Synthetic
MASEKEIRRERFLNVFPKLVEELNASLLAYGMPKEACDWYAHSLNYNTPGGKLNRGLSVVDTYAILSNKTVEQLGQEEYEKVAILGWCIELLQAYWLVADDMMDKSITRRGQPCWYKVPEVGEIAIWDAFMLEAAIYKLLKSHFRNEKYYIDITELFHEVTFQTELGQLMDLITAPEDKVDLSKFSLKKHSFIVTFKTAYYSFYLPVALAMYVAGITDEKDLKQARDVLIPLGEYFQIQDDYLDCFGTPEQIGKIGTDIQDNKCSWVINKALELASAEQRKTLDENYGKKDSVAEAKCKKIFNDLKIEQLYHEYEESIAKDLKAKISQVDESRGFKADVLTAFLNKVYKRSKGSGSAGSDQIEGSPHHESDNSIATKILNFGHTCWKLQRPYVVKGMISIACGLFGRELFHNTNLLSWSLMLKAFSSLMVILSFNFFAASMNQIYDVDIDRINKPDLPLVSGEMSIETAWILSIIVALTGLILTIKLNCGPLFISLYCVSLFAGFAYSVPPIRWKQYPFTNFLITISSHVGVNFTCYYASRAAFGLPFEMSPPFTFILAFMTVMGMTIAFAKDISDIEGDAKYGVSTVATKLGARNMTFVVSGVLLLTYVSAILAAIIWPQAFKSNVMLLSHAILAFCLIFQTRELALANYASAPSRQFFEFIWKLHYAEYLVYVFI

SEQ ID NO: 257 - protein, 677 aa, Artificial Sequence
  Synthetic
MASEKEIRRERFLNVFPKLVEELNASLLAYGMPKEACDWYAHSLNYNTPGGKLNRGLSVVDTYAILSNKTVEQLGQEEYEKVAILGWCIELLQAYWLVADDMMDKSITRRGQPCWYKVPEVGEIAIWDAFMLEAAIYKLLKSHFRNEKYYIDITELFHEVTFQTELGQLMDLITAPEDKVDLSKFSLKKHSFIVTFKTAYYSFYLPVALAMYVAGITDEKDLKQARDVLIPLGEYFQIQDDYLDCFGTPEQIGKIGTDIQDNKCSWVINKALELASAEQRKTLDENYGKKDSVAEAKCKKIFNDLKIEQLYHEYEESIAKDLKAKISQVDESRGFKADVLTAFLNKVYKRSKGSGSAGSDQIEGSPHHESDNSIATKILNFGHTCWKLQRPYVVKGLISIACGLFGRELFHNTNLLSWSLMLKAFSSLMVILSFNFFAASMNQIYDVDIDRINKPDLPLVSGEMSIETAWILSIIVALTGLILTIKLNCGPLFISLYCVSLFAGFAYSVPPIRWKQYPFTNFLITISSHVGVNFTCYYASRAAFGLPFEMSPPFTFILAFMTVMGMTIAFAKDISDIEGDAKYGVSTVATKLGARNMTFVVSGVLLLTYVSAILAAIIWPQAFKSNVMLLSHAILAFCLIFQTRELALANYASAPSRQFFEFIWKLHYAEYLVYVFI

SEQ ID NO: 258 - protein, 677 aa, Artificial Sequence
  Synthetic
MASEKEIRRERFLNVFPKLVEELNASLLAYGMPKEACDWYAHSLNYNTPGGKLNRGLSVVDTYAILSNKTVEQLGQEEYEKVAILGWCIELLQAYWLVADDMMDKSITRRGQPCWYKVPEVGEIAIWDAFMLEAAIYKLLKSHFRNEKYYIDITELFHEVTFQTELGQLMDLITAPEDKVDLSKFSLKKHSFIVTFKTAYYSFYLPVALAMYVAGITDEKDLKQARDVLIPLGEYFQIQDDYLDCFGTPEQIGKIGTDIQDNKCSWVINKALELASAEQRKTLDENYGKKDSVAEAKCKKIFNDLKIEQLYHEYEESIAKDLKAKISQVDESRGFKADVLTAFLNKVYKRSKGSGSAGSDQIEGSPHHESDNSIATKILNFGHTFWKLQRPYVVKGLISIACGLFGKELLHNTNLISWSLMFKAFFALVPILSFNFFAASVNQIYDVEIDRINKPDLPLVSGEMSIETAWILSIIVALTGLIVTIKMKGGPLFVFIYIFGLFAGFAYSVPPIRWKQYPFTNFLITISSHVGLAFTSYYASRAALGLPFELRPSFSFIIAFMTVMGMTIAFAKDISDIEGDAKYGVRTVATKLGARNMTFVVSGVLLLNYLVSILAGIIWPQAFNSNVMILSHAILAFCLIFRTRELALANYASAPSRQFFEFIWNLYYAEYLVYVFI

SEQ ID NO: 259 - protein, 676 aa, Artificial Sequence
  Synthetic
MASEKEIRRERFLNVFPKLVEELNASLLAYGMPKEACDWYAHSLNYNTPGGKLNRGLSVVDTYAILSNKTVEQLGQEEYEKVAILGWCIELLQAYWLVADDMMDKSITRRGQPCWYKVPEVGEIAIWDAFMLEAAIYKLLKSHFRNEKYYIDITELFHEVTFQTELGQLMDLITAPEDKVDLSKFSLKKHSFIVTFKTAYYSFYLPVALAMYVAGITDEKDLKQARDVLIPLGEYFQIQDDYLDCFGTPEQIGKIGTDIQDNKCSWVINKALELASAEQRKTLDENYGKKDSVAEAKCKKIFNDLKIEQLYHEYEESIAKDLKAKISQVDESRGFKADVLTAFLNKVYKRSKGSGSAGSDQIEGSPHHESDNSIATKILNFGHTCWKLQRPYVVKGMISIACGLFGKELLHNTNLISWSLMFKAFFALVPILSFNFFAAIMNQIYDVDIDRINKPDLPLVSGEMSIETAWILSIIVALTGLIVTIKMKGGPLFVFIYIFGIFAGFAYSVPPIRWKQYPFTNFLITISSHVGLAFTSYYASRAALGLPFELRPSFSFIIAFMTVMGMTIAFAKDISDIEGDAKYGVSTVATKLGARNMTFVVSGVLLLNYLVSISIGIIWPFLWSKVVTVLGHTILASILWTNAKSVDLSSKAAITSFYMFIWKLFYAEYLLIPLVR

SEQ ID NO: 260 - protein, 677 aa, Artificial Sequence
  Synthetic
MASEKEIRRERFLNVFPKLVEELNASLLAYGMPKEACDWYAHSLNYNTPGGKLNRGLSVVDTYAILSNKTVEQLGQEEYEKVAILGWCIELLQAYWLVADDMMDKSITRRGQPCWYKVPEVGEIAIWDAFMLEAAIYKLLKSHFRNEKYYIDITELFHEVTFQTELGQLMDLITAPEDKVDLSKFSLKKHSFIVTFKTAYYSFYLPVALAMYVAGITDEKDLKQARDVLIPLGEYFQIQDDYLDCFGTPEQIGKIGTDIQDNKCSWVINKALELASAEQRKTLDENYGKKDSVAEAKCKKIFNDLKIEQLYHEYEESIAKDLKAKISQVDESRGFKADVLTAFLNKVYKRSKGSGSAGSDQIEGSPHHESDNSIATKILNFGHTCWKLQRPYVVKGMISIACGLFGRELFHNTNLLSWSLMLKAFSSLMVILSFNFFAASMNQIYDVDIDRINKPDLPLVSGEMSIETAWILSIIVALTGLILTIKLNCGPLFISLYCVSIFAGFAYSVPPIRWKQYPFTNFLITISSHVGVNFTCYYASRAAFGLPFEMSPPFTFILAFMTVMGMTIAFAKDISDIEGDAKYGVRTVATKLGARNMTFVVSGVLLLTYVSAILAAIIWPQAFKSNVMLLSHAILAFCLIFQTRELALANYASAPSRQFFEFIWKLHYAEYLVYVFI

SEQ ID NO: 261 - protein, 677 aa, Artificial Sequence
  Synthetic
MASEKEIRRERFLNVFPKLVEELNASLLAYGMPKEACDWYAHSLNYNTPGGKLNRGLSVVDTYAILSNKTVEQLGQEEYEKVAILGWCIELLQAYWLVADDMMDKSITRRGQPCWYKVPEVGEIAIWDAFMLEAAIYKLLKSHFRNEKYYIDITELFHEVTFQTELGQLMDLITAPEDKVDLSKFSLKKHSFIVTFKTAYYSFYLPVALAMYVAGITDEKDLKQARDVLIPLGEYFQIQDDYLDCFGTPEQIGKIGTDIQDNKCSWVINKALELASAEQRKTLDENYGKKDSVAEAKCKKIFNDLKIEQLYHEYEESIAKDLKAKISQVDESRGFKADVLTAFLNKVYKRSKGSGSAGSDQIEGSPHHESDNSIATKILNFGHTCWKLQRPYVVKGLISIACGLFGRELFHNTNLLSWSLMLKAFSSLMVILSFNFFAASMNQIYDVDIDRINKPDLPLVSGEMSIETAWILSIIVALTGLILTIKLNCGPLFISLYCVSIFAGFAYSVPPIRWKQYPFTNFLITISSHVGVNFTCYYASRAAFGLPFEMSPPFTFILAFMTVMGMTIAFAKDISDIEGDAKYGVRTVATKLGARNMTFVVSGVLLLTYVSAILAAIIWPQAFKSNVMLLSHAILAFCLIFQTRELALANYASAPSRQFFEFIWKLHYAEYLVYVFI

SEQ ID NO: 262 - protein, 677 aa, Artificial Sequence
  Synthetic
MASEKEIRRERFLNVFPKLVEELNASLLAYGMPKEACDWYAHSLNYNTPGGKLNRGLSVVDTYAILSNKTVEQLGQEEYEKVAILGWCIELLQAYWLVADDMMDKSITRRGQPCWYKVPEVGEIAIWDAFMLEAAIYKLLKSHFRNEKYYIDITELFHEVTFQTELGQLMDLITAPEDKVDLSKFSLKKHSFIVTFKTAYYSFYLPVALAMYVAGITDEKDLKQARDVLIPLGEYFQIQDDYLDCFGTPEQIGKIGTDIQDNKCSWVINKALELASAEQRKTLDENYGKKDSVAEAKCKKIFNDLKIEQLYHEYEESIAKDLKAKISQVDESRGFKADVLTAFLNKVYKRSKGSGSAGSDQIEGSPHHESDNSIATKILNFGHTFWKLQRPYVVKGLISIACGLFGKELLHNTNLISWSLMFKAFFALVPILSFNFFAASMNQIYDVEIDRINKPDLPLVSGEMSIETAWILSIIVALTGLIVTIKMKGGPLFVFIYIFGLFAGFAYSVPPIRWKQYPFTNFLITISSHVGLAFTSYYASRAALGLPFELRPSFSFIIAFMTVMGMTIAFAKDISDIEGDAKYGVRTVATKLGARNMTRVVSGVLLLNYLVSILAGIIWPQAFNSNVMILSHAILAFCLIFRTRELALANYASAPSRQFFEFIWNLYYAEYLVYVFI

SEQ ID NO: 263 - protein, 677 aa, Artificial Sequence
  Synthetic
MASEKEIRRERFLNVFPKLVEELNASLLAYGMPKEACDWYAHSLNYNTPGGKLNRGLSVVDTYAILSNKTVEQLGQEEYEKVAILGWCIELLQAYWLVADDMMDKSITRRGQPCWYKVPEVGEIAIWDAFMLEAAIYKLLKSHFRNEKYYIDITELFHEVTFQTELGQLMDLITAPEDKVDLSKFSLKKHSFIVTFKTAYYSFYLPVALAMYVAGITDEKDLKQARDVLIPLGEYFQIQDDYLDCFGTPEQIGKIGTDIQDNKCSWVINKALELASAEQRKTLDENYGKKDSVAEAKCKKIFNDLKIEQLYHEYEESIAKDLKAKISQVDESRGFKADVLTAFLNKVYKRSKGSGSAGSDQIEGSPHHESDNSIATKILNFGHTFWKLQRPYVVKGMISIACGLFGKELLHNTNLISWSLMFKAFFALVPILSFNFFAASVNQIYDVEIDRINKPDLPLVSGEMSIETAWILSIIVALTGLIVTIKMKGGPLFVFIYIFGLFAGFAYSVPPIRWKQYPFTNFLITISSHVGLAFTSYYASRAALGLPFELRPSFSFIIAFMTVMGMTIAFAKDISDIEGDAKYGVRTVATKLGARNMTRVVSGVLLLNYLVSILAGIIWPQAFNSNVMILSHAILAFCLIFRTRELALANYASAPSRQFFEFIWRLYYAEYLVYVFI

SEQ ID NO: 264 - protein, 677 aa, Artificial Sequence
  Synthetic
MASEKEIRRERFLNVFPKLVEELNASLLAYGMPKEACDWYAHSLNYNTPGGKLNRGLSVVDTYAILSNKTVEQLGQEEYEKVAILGWCIELLQAYWLVADDMMDKSITRRGQPCWYKVPEVGEIAIWDAFMLEAAIYKLLKSHFRNEKYYIDITELFHEVTFQTELGQLMDLITAPEDKVDLSKFSLKKHSFIVTFKTAYYSFYLPVALAMYVAGITDEKDLKQARDVLIPLGEYFQIQDDYLDCFGTPEQIGKIGTDIQDNKCSWVINKALELASAEQRKTLDENYGKKDSVAEAKCKKIFNDLKIEQLYHEYEESIAKDLKAKISQVDESRGFKADVLTAFLNKVYKRSKGSGSAGSDQIEGSPHHESDNSIATKILNFGHTCWKLQRPYVVKGMISIACGLFGRELFHNTNLLSWSLMLKAFSSLMVILSFNFFAASMNQIYDVDIDRINKPDLPLVSGEMSIETAWILSIIVALTGLILTIKLNCGPLFISLYCVSIFAGFAYSVPPIRWKRYPFTNFLITISSHVGVNFTCYYASRAAFGLPFEMSPPFTFILAFMTVMGMTIAFAKDISDIEGDAKYGVSTVATKLGARNMTFVVSGVLLLTYVSAILAAIIWPQAFKSNVMLLSHAILAFCLIFQTRELALANYASAPSRQFFEFIWKLHYAEYLVYVFI

SEQ ID NO: 265 - protein, 677 aa, Artificial Sequence
  Synthetic
MASEKEIRRERFLNVFPKLVEELNASLLAYGMPKEACDWYAHSLNYNTPGGKLNRGLSVVDTYAILSNKTVEQLGQEEYEKVAILGWCIELLQAYWLVADDMMDKSITRRGQPCWYKVPEVGEIAIWDAFMLEAAIYKLLKSHFRNEKYYIDITELFHEVTFQTELGQLMDLITAPEDKVDLSKFSLKKHSFIVTFKTAYYSFYLPVALAMYVAGITDEKDLKQARDVLIPLGEYFQIQDDYLDCFGTPEQIGKIGTDIQDNKCSWVINKALELASAEQRKTLDENYGKKDSVAEAKCKKIFNDLKIEQLYHEYEESIAKDLKAKISQVDESRGFKADVLTAFLNKVYKRSKGSGSAGSDQIEGSPHHESDNSIATKILNFGHTCWKLQRPYVVKGLISIACGLFGRELFHNTNLLSWSLMLKAFSSLMVILSFNFFAASMNQIYDVDIDRINKPDLPLVSGEMSIETAWILSIIVALTGLILTIKLNCGPLFISLYCVSIFAGFAYSVPPIRWKRYPFTNFLITISSHVGVNFTCYYASRAAFGLPFEMSPPFTFILAFMTVMGMTIAFAKDISDIEGDAKYGVSTVATKLGARNMTFVVSGVLLLTYVSAILAAIIWPQAFKSNVMLLSHAILAFCLIFQTRELALANYASAPSRQFFEFIWKLHYAEYLVYVFI

SEQ ID NO: 266 - protein, 677 aa, Artificial Sequence
  Synthetic
MASEKEIRRERFLNVFPKLVEELNASLLAYGMPKEACDWYAHSLNYNTPGGKLNRGLSVVDTYAILSNKTVEQLGQEEYEKVAILGWCIELLQAYWLVADDMMDKSITRRGQPCWYKVPEVGEIAIWDAFMLEAAIYKLLKSHFRNEKYYIDITELFHEVTFQTELGQLMDLITAPEDKVDLSKFSLKKHSFIVTFKTAYYSFYLPVALAMYVAGITDEKDLKQARDVLIPLGEYFQIQDDYLDCFGTPEQIGKIGTDIQDNKCSWVINKALELASAEQRKTLDENYGKKDSVAEAKCKKIFNDLKIEQLYHEYEESIAKDLKAKISQVDESRGFKADVLTAFLNKVYKRSKGSGSAGSDQIEGSPHHESDNSIATKILNFGHTFWKLQRPYVVKGLISIACGLFGKELLHNTNLISWSLMFKAFFALVPILSFNFFAASVNQIYDVDIDRINKPDLPLVSGEMSIETAWILSIIVALTGLIVTIKMKGGPLFVFIYIFGLFAGFAYSVPPIRWKQYPFTNFLITISSHVGLAFTSYYASRAALGLPFELRPSFSFIIAFMTVMGMTIAFAKDISDIEGDAKYGVRTVATKLGARNMTRVVSGVLLLNYLVSILAGIIWPQAFNSNVMILSHAILAFCLIFRTRELALANYASAPSRQFFEFIWNLYYAEYLVYVFI

SEQ ID NO: 267 - protein, 677 aa, Artificial Sequence
  Synthetic
MASEKEIRRERFLNVFPKLVEELNASLLAYGMPKEACDWYAHSLNYNTPGGKLNRGLSVVDTYAILSNKTVEQLGQEEYEKVAILGWCIELLQAYWLVADDMMDKSITRRGQPCWYKVPEVGEIAIWDAFMLEAAIYKLLKSHFRNEKYYIDITELFHEVTFQTELGQLMDLITAPEDKVDLSKFSLKKHSFIVTFKTAYYSFYLPVALAMYVAGITDEKDLKQARDVLIPLGEYFQIQDDYLDCFGTPEQIGKIGTDIQDNKCSWVINKALELASAEQRKTLDENYGKKDSVAEAKCKKIFNDLKIEQLYHEYEESIAKDLKAKISQVDESRGFKADVLTAFLNKVYKRSKGSGSAGSDQIEGSPHHESDNSIATKILNFGHTFWKLQRPYVVKGLISIACGLFGKELLHNTNLISWSLMFKAFFALVPILSFNFFAAIVNQIYDVEIDRINKPDLPLVSGEMSIETAWILSIIVALTGLIVTIKMKGGPLFVFIYIFGLFAGFAYSVPPIRWKQYPFTNFLITISSHVGLAFTSYYASRAALGLPFELRPSFSFIIAFMTVMGMTIAFAKDISDIEGDAKYGVRTVATKLGARNMTRVVSGVLLLNYLVSILAGIIWPQAFNSNVMILSHAILAFCLIFRTRELALANYASAPSRQFFEFIWRLYYAEYLVYVFI

SEQ ID NO: 268 - protein, 677 aa, Artificial Sequence
  Synthetic
MASEKEIRRERFLNVFPKLVEELNASLLAYGMPKEACDWYAHSLNYNTPGGKLNRGLSVVDTYAILSNKTVEQLGQEEYEKVAILGWCIELLQAYWLVADDMMDKSITRRGQPCWYKVPEVGEIAIWDAFMLEAAIYKLLKSHFRNEKYYIDITELFHEVTFQTELGQLMDLITAPEDKVDLSKFSLKKHSFIVTFKTAYYSFYLPVALAMYVAGITDEKDLKQARDVLIPLGEYFQIQDDYLDCFGTPEQIGKIGTDIQDNKCSWVINKALELASAEQRKTLDENYGKKDSVAEAKCKKIFNDLKIEQLYHEYEESIAKDLKAKISQVDESRGFKADVLTAFLNKVYKRSKGSGSAGSDQIEGSPHHESDNSIATKILNFGHTCWKLQRPYVVKGMISIACGLFGRELFHNTNLLSWSLMLKAFSSLMVILSFNFFAASMNQIYDVDIDRINKPDLPLVSGEMSIETAWILSIIVALTGLILTIKLNCGPLFISLYCVSIFAGFAYSVPPIRWKQYPFTNFLITISSHVGVNFTCYYASRAAFGLPFEMSPPFTFILAFMTVMGMTIAFAKDISDIEGDAKYGVSTVATKLGARNMTFVVSGVLLLTYVSAILAAIIWPQAFKSNVMLLSHAILAFCLIFRTRELALANYASAPSRQFFEFIWKLHYAEYLVYVFI

SEQ ID NO: 269 - protein, 677 aa, Artificial Sequence
  Synthetic
MASEKEIRRERFLNVFPKLVEELNASLLAYGMPKEACDWYAHSLNYNTPGGKLNRGLSVVDTYAILSNKTVEQLGQEEYEKVAILGWCIELLQAYWLVADDMMDKSITRRGQPCWYKVPEVGEIAIWDAFMLEAAIYKLLKSHFRNEKYYIDITELFHEVTFQTELGQLMDLITAPEDKVDLSKFSLKKHSFIVTFKTAYYSFYLPVALAMYVAGITDEKDLKQARDVLIPLGEYFQIQDDYLDCFGTPEQIGKIGTDIQDNKCSWVINKALELASAEQRKTLDENYGKKDSVAEAKCKKIFNDLKIEQLYHEYEESIAKDLKAKISQVDESRGFKADVLTAFLNKVYKRSKGSGSAGSDQIEGSPHHESDNSIATKILNFGHTCWKLQRPYVVKGLISIACGLFGRELFHNTNLLSWSLMLKAFSSLMVILSFNFFAASMNQIYDVDIDRINKPDLPLVSGEMSIETAWILSIIVALTGLILTIKLNCGPLFISLYCVSIFAGFAYSVPPIRWKQYPFTNFLITISSHVGVNFTCYYASRAAFGLPFEMSPPFTFILAFMTVMGMTIAFAKDISDIEGDAKYGVSTVATKLGARNMTFVVSGVLLLTYVSAILAAIIWPQAFKSNVMLLSHAILAFCLIFRTRELALANYASAPSRQFFEFIWKLHYAEYLVYVFI

SEQ ID NO: 270 - protein, 677 aa, Artificial Sequence
  Synthetic
MASEKEIRRERFLNVFPKLVEELNASLLAYGMPKEACDWYAHSLNYNTPGGKLNRGLSVVDTYAILSNKTVEQLGQEEYEKVAILGWCIELLQAYWLVADDMMDKSITRRGQPCWYKVPEVGEIAIWDAFMLEAAIYKLLKSHFRNEKYYIDITELFHEVTFQTELGQLMDLITAPEDKVDLSKFSLKKHSFIVTFKTAYYSFYLPVALAMYVAGITDEKDLKQARDVLIPLGEYFQIQDDYLDCFGTPEQIGKIGTDIQDNKCSWVINKALELASAEQRKTLDENYGKKDSVAEAKCKKIFNDLKIEQLYHEYEESIAKDLKAKISQVDESRGFKADVLTAFLNKVYKRSKGSGSAGSDQIEGSPHHESDNSIATKILNFGHTFWKLQRPYVVKGLISIACGLFGKELLHNTNLISWSLMFKAFFALVPILSFNFFAASVNQIYDVEIDRINKPDLPLVSGEMSIETAWILSIIVALTGLIVTIKMKGGPLFVFIYIFGLFAGFAYSVPPIRWKQYPFTNFLITISSHVGLAFTSYYASRAALGLPFELRPSFSFIIAFMTVMGMTIAFAKDISDIEGDAKYGVRTVATKLGARNMTRVVSGVLLLNYLVSILAGIIWPQAFNSNVMILSHAILAFCLIFQTRELALANYASAPSRQFFEFIWRLYYAEYLVYVFI

SEQ ID NO: 271 - protein, 677 aa, Artificial Sequence
  Synthetic
MASEKEIRRERFLNVFPKLVEELNASLLAYGMPKEACDWYAHSLNYNTPGGKLNRGLSVVDTYAILSNKTVEQLGQEEYEKVAILGWCIELLQAYWLVADDMMDKSITRRGQPCWYKVPEVGEIAIWDAFMLEAAIYKLLKSHFRNEKYYIDITELFHEVTFQTELGQLMDLITAPEDKVDLSKFSLKKHSFIVTFKTAYYSFYLPVALAMYVAGITDEKDLKQARDVLIPLGEYFQIQDDYLDCFGTPEQIGKIGTDIQDNKCSWVINKALELASAEQRKTLDENYGKKDSVAEAKCKKIFNDLKIEQLYHEYEESIAKDLKAKISQVDESRGFKADVLTAFLNKVYKRSKGSGSAGSDQIEGSPHHESDNSIATKILNFGHTFWKLQRPYVVKGMISIACGLFGKELLHNTNLISWSLMFKAFFALVPILSFNFFAAVVNQIYDVEIDRINKPDLPLVSGEMSIETAWILSIIVALTGLIVTIKMKGGPLFVFIYIFGLFAGFAYSVPPIRWKQYPFTNFLITISSHVGLAFTSYYASRAALGLPFELRPSFSFIIAFMTVMGMTIAFAKDISDIEGDAKYGVRTVATKLGARNMTRVVSGVLLLNYLVSILAGIIWPQAFNSNVMILSHAILAFCLIFRTRELALANYASAPSRQFFEFIWNLYYAEYLVYVFI

SEQ ID NO: 272 - protein, 677 aa, Artificial Sequence
  Synthetic
MASEKEIRRERFLNVFPKLVEELNASLLAYGMPKEACDWYAHSLNYNTPGGKLNRGLSVVDTYAILSNKTVEQLGQEEYEKVAILGWCIELLQAYWLVADDMMDKSITRRGQPCWYKVPEVGEIAIWDAFMLEAAIYKLLKSHFRNEKYYIDITELFHEVTFQTELGQLMDLITAPEDKVDLSKFSLKKHSFIVTFKTAYYSFYLPVALAMYVAGITDEKDLKQARDVLIPLGEYFQIQDDYLDCFGTPEQIGKIGTDIQDNKCSWVINKALELASAEQRKTLDENYGKKDSVAEAKCKKIFNDLKIEQLYHEYEESIAKDLKAKISQVDESRGFKADVLTAFLNKVYKRSKGSGSAGSDQIEGSPHHESDNSIATKILNFGHTCWKLQRPYVVKGLISIACGLFGRELFHNTNLLSWSLMLKAFSSLMVILSFNFFAAIMNQIYDVDIDRINKPDLPLVSGEMSIETAWILSIIVALTGLILTIKLNCGPLFISLYCVSLFAGFAYSVPPIRWKQYPFTNFLITISSHVGVNFTCYYASRAAFGLPFEMSPPFTFILAFMTVMGMTIAFAKDISDIEGDAKYGVSTVATKLGARNMTFVVSGVLLLTYVSAILAAIIWPQAFKSNVMLLSHAILAFCLIFQTRELALANYASAPSRQFFEFIWKLHYAEYLVYVFI

SEQ ID NO: 273 - protein, 677 aa, Artificial Sequence
  Synthetic
MASEKEIRRERFLNVFPKLVEELNASLLAYGMPKEACDWYAHSLNYNTPGGKLNRGLSVVDTYAILSNKTVEQLGQEEYEKVAILGWCIELLQAYWLVADDMMDKSITRRGQPCWYKVPEVGEIAIWDAFMLEAAIYKLLKSHFRNEKYYIDITELFHEVTFQTELGQLMDLITAPEDKVDLSKFSLKKHSFIVTFKTAYYSFYLPVALAMYVAGITDEKDLKQARDVLIPLGEYFQIQDDYLDCFGTPEQIGKIGTDIQDNKCSWVINKALELASAEQRKTLDENYGKKDSVAEAKCKKIFNDLKIEQLYHEYEESIAKDLKAKISQVDESRGFKADVLTAFLNKVYKRSKGSGSAGSDQIEGSPHHESDNSIATKILNFGHTCWKLQRPYVVKGMISIACGLFGRELFHNTNLLSWSLMLKAFSSLMVILSFNFFAAVMNQIYDVDIDRINKPDLPLVSGEMSIETAWILSIIVALTGLILTIKLNCGPLFISLYCVSLFAGFAYSVPPIRWKQYPFTNFLITISSHVGVNFTCYYASRAAFGLPFEMSPPFTFILAFMTVMGMTIAFAKDISDIEGDAKYGVRTVATKLGARNMTFVVSGVLLLTYVSAILAAIIWPQAFKSNVMLLSHAILAFCLIFQTRELALANYASAPSRQFFEFIWKLHYAEYLVYVFI

SEQ ID NO: 274 - protein, 677 aa, Artificial Sequence
  Synthetic
MASEKEIRRERFLNVFPKLVEELNASLLAYGMPKEACDWYAHSLNYNTPGGKLNRGLSVVDTYAILSNKTVEQLGQEEYEKVAILGWCIELLQAYWLVADDMMDKSITRRGQPCWYKVPEVGEIAIWDAFMLEAAIYKLLKSHFRNEKYYIDITELFHEVTFQTELGQLMDLITAPEDKVDLSKFSLKKHSFIVTFKTAYYSFYLPVALAMYVAGITDEKDLKQARDVLIPLGEYFQIQDDYLDCFGTPEQIGKIGTDIQDNKCSWVINKALELASAEQRKTLDENYGKKDSVAEAKCKKIFNDLKIEQLYHEYEESIAKDLKAKISQVDESRGFKADVLTAFLNKVYKRSKGSGSAGSDQIEGSPHHESDNSIATKILNFGHTFWKLQRPYVVKGLISIACGLFGKELLHNTNLISWSLMFKAFFALVPILSFNFFAASVNQIYDVEIDRINKPDLPLVSGEMSIETAWILSIIVALTGLIVTIKMKGGPLFVFIYIFGLFAGFAYSVPPIRWKQYPFTNFLITISSHVGLAFTSYYASRAALGLPFELRPSFSFIIAFMTVMGMTIAFAKDISDIEGDAKYGVRTVATKLGARNMTRVVSGVLLLNYLVSILAGIIWPQAFNSNVMILSHAILAFCLIFRTRELALANYASAPSRQFFEFIWLLYYAEYLVYVFI

SEQ ID NO: 275 - protein, 677 aa, Artificial Sequence
  Synthetic
MASEKEIRRERFLNVFPKLVEELNASLLAYGMPKEACDWYAHSLNYNTPGGKLNRGLSVVDTYAILSNKTVEQLGQEEYEKVAILGWCIELLQAYWLVADDMMDKSITRRGQPCWYKVPEVGEIAIWDAFMLEAAIYKLLKSHFRNEKYYIDITELFHEVTFQTELGQLMDLITAPEDKVDLSKFSLKKHSFIVTFKTAYYSFYLPVALAMYVAGITDEKDLKQARDVLIPLGEYFQIQDDYLDCFGTPEQIGKIGTDIQDNKCSWVINKALELASAEQRKTLDENYGKKDSVAEAKCKKIFNDLKIEQLYHEYEESIAKDLKAKISQVDESRGFKADVLTAFLNKVYKRSKGSGSAGSDQIEGSPHHESDNSIATKILNFGHTFWKLQRPYVVKGLISIACGLFGKELLHNTNLISWSLMFKAFFALVPILSFNFFAAVVNQIYDVEIDRINKPDLPLVSGEMSIETAWILSIIVALTGLIVTIKMKGGPLFVFIYIFGLFAGFAYSVPPIRWKQYPFTNFLITISSHVGLAFTSYYASRAALGLPFELRPSFSFIIAFMTVMGMTIAFAKDISDIEGDAKYGVRTVATKLGARNMTRVVSGVLLLNYLVSILAGIIWPQAFNSNVMILSHAILAFCLIFQTRELALANYASAPSRQFFEFIWNLYYAEYLVYVFI

SEQ ID NO: 276 - protein, 677 aa, Artificial Sequence
  Synthetic
MASEKEIRRERFLNVFPKLVEELNASLLAYGMPKEACDWYAHSLNYNTPGGKLNRGLSVVDTYAILSNKTVEQLGQEEYEKVAILGWCIELLQAYWLVADDMMDKSITRRGQPCWYKVPEVGEIAIWDAFMLEAAIYKLLKSHFRNEKYYIDITELFHEVTFQTELGQLMDLITAPEDKVDLSKFSLKKHSFIVTFKTAYYSFYLPVALAMYVAGITDEKDLKQARDVLIPLGEYFQIQDDYLDCFGTPEQIGKIGTDIQDNKCSWVINKALELASAEQRKTLDENYGKKDSVAEAKCKKIFNDLKIEQLYHEYEESIAKDLKAKISQVDESRGFKADVLTAFLNKVYKRSKGSGSAGSDQIEGSPHHESDNSIATKILNFGHTCWKLQRPYVVKGMISIACGLFGRELFHNTNLLSWSLMLKAFSSLMVILSFNFFAAVMNQIYDVDIDRINKPDLPLVSGEMSIETAWILSIIVALTGLILTIKLNCGPLFISLYCVSLFAGFAYSVPPIRWKRYPFTNFLITISSHVGVNFTCYYASRAAFGLPFEMSPPFTFILAFMTVMGMTIAFAKDISDIEGDAKYGVSTVATKLGARNMTFVVSGVLLLTYVSAILAAIIWPQAFKSNVMLLSHAILAFCLIFQTRELALANYASAPSRQFFEFIWKLHYAEYLVYVFI

SEQ ID NO: 277 - protein, 677 aa, Artificial Sequence
  Synthetic
MASEKEIRRERFLNVFPKLVEELNASLLAYGMPKEACDWYAHSLNYNTPGGKLNRGLSVVDTYAILSNKTVEQLGQEEYEKVAILGWCIELLQAYWLVADDMMDKSITRRGQPCWYKVPEVGEIAIWDAFMLEAAIYKLLKSHFRNEKYYIDITELFHEVTFQTELGQLMDLITAPEDKVDLSKFSLKKHSFIVTFKTAYYSFYLPVALAMYVAGITDEKDLKQARDVLIPLGEYFQIQDDYLDCFGTPEQIGKIGTDIQDNKCSWVINKALELASAEQRKTLDENYGKKDSVAEAKCKKIFNDLKIEQLYHEYEESIAKDLKAKISQVDESRGFKADVLTAFLNKVYKRSKGSGSAGSDQIEGSPHHESDNSIATKILNFGHTCWKLQRPYVVKGLISIACGLFGRELFHNTNLLSWSLMLKAFSSLMVILSFNFFAAIMNQIYDVDIDRINKPDLPLVSGEMSIETAWILSIIVALTGLILTIKLNCGPLFISLYCVSIFAGFAYSVPPIRWKQYPFTNFLITISSHVGVNFTCYYASRAAFGLPFEMSPPFTFILAFMTVMGMTIAFAKDISDIEGDAKYGVRTVATKLGARNMTFVVSGVLLLTYVSAILAAIIWPQAFKSNVMLLSHAILAFCLIFQTRELALANYASAPSRQFFEFIWKLHYAEYLVYVFI

SEQ ID NO: 278 - protein, 677 aa, Artificial Sequence
  Synthetic
MASEKEIRRERFLNVFPKLVEELNASLLAYGMPKEACDWYAHSLNYNTPGGKLNRGLSVVDTYAILSNKTVEQLGQEEYEKVAILGWCIELLQAYWLVADDMMDKSITRRGQPCWYKVPEVGEIAIWDAFMLEAAIYKLLKSHFRNEKYYIDITELFHEVTFQTELGQLMDLITAPEDKVDLSKFSLKKHSFIVTFKTAYYSFYLPVALAMYVAGITDEKDLKQARDVLIPLGEYFQIQDDYLDCFGTPEQIGKIGTDIQDNKCSWVINKALELASAEQRKTLDENYGKKDSVAEAKCKKIFNDLKIEQLYHEYEESIAKDLKAKISQVDESRGFKADVLTAFLNKVYKRSKGSGSAGSDQIEGSPHHESDNSIATKILNFGHTCWKLQRPYVVKGLISIACGLFGKELLHNTNLISWSLMFKAFFALVPILSFNFFAASVNQIYDVEIDRINKPDLPLVSGEMSIETAWILSIIVALTGLIVTIKMKGGPLFVFIYIFGLFAGFAYSVPPIRWKQYPFTNFLITISSHVGLAFTSYYASRAALGLPFELRPSFSFIIAFMTVMGMTIAFAKDISDIEGDAKYGVRTVATKLGARNMTRVVSGVLLLNYLVSILAGIIWPQAFNSNVMILSHAILAFCLIFRTRELALANYASAPSRQFFEFIWRLYYAEYLVYVFI

SEQ ID NO: 279 - protein, 677 aa, Artificial Sequence
  Synthetic
MASEKEIRRERFLNVFPKLVEELNASLLAYGMPKEACDWYAHSLNYNTPGGKLNRGLSVVDTYAILSNKTVEQLGQEEYEKVAILGWCIELLQAYWLVADDMMDKSITRRGQPCWYKVPEVGEIAIWDAFMLEAAIYKLLKSHFRNEKYYIDITELFHEVTFQTELGQLMDLITAPEDKVDLSKFSLKKHSFIVTFKTAYYSFYLPVALAMYVAGITDEKDLKQARDVLIPLGEYFQIQDDYLDCFGTPEQIGKIGTDIQDNKCSWVINKALELASAEQRKTLDENYGKKDSVAEAKCKKIFNDLKIEQLYHEYEESIAKDLKAKISQVDESRGFKADVLTAFLNKVYKRSKGSGSAGSDQIEGSPHHESDNSIATKILNFGHTCWKLQRPYVVKGLISIACGLFGRELFHNTNLLSWSLMLKAFSSLMVILSFNFFAAIMNQIYDVDIDRINKPDLPLVSGEMSIETAWILSIIVALTGLILTIKLNCGPLFISLYCVSIFAGFAYSVPPIRWKRYPFTNFLITISSHVGVNFTCYYASRAAFGLPFEMSPPFTFILAFMTVMGMTIAFAKDISDIEGDAKYGVSTVATKLGARNMTFVVSGVLLLTYVSAILAAIIWPQAFKSNVMLLSHAILAFCLIFQTRELALANYASAPSRQFFEFIWKLHYAEYLVYVFI

SEQ ID NO: 280 - protein, 677 aa, Artificial Sequence
  Synthetic
MASEKEIRRERFLNVFPKLVEELNASLLAYGMPKEACDWYAHSLNYNTPGGKLNRGLSVVDTYAILSNKTVEQLGQEEYEKVAILGWCIELLQAYWLVADDMMDKSITRRGQPCWYKVPEVGEIAIWDAFMLEAAIYKLLKSHFRNEKYYIDITELFHEVTFQTELGQLMDLITAPEDKVDLSKFSLKKHSFIVTFKTAYYSFYLPVALAMYVAGITDEKDLKQARDVLIPLGEYFQIQDDYLDCFGTPEQIGKIGTDIQDNKCSWVINKALELASAEQRKTLDENYGKKDSVAEAKCKKIFNDLKIEQLYHEYEESIAKDLKAKISQVDESRGFKADVLTAFLNKVYKRSKGSGSAGSDQIEGSPHHESDNSIATKILNFGHTCWKLQRPYVVKGLISIACGLFGKELLHNTNLISWSLMFKAFFALVPILSFNFFAAVVNQIYDVEIDRINKPDLPLVSGEMSIETAWILSIIVALTGLIVTIKMKGGPLFVFIYIFGLFAGFAYSVPPIRWKQYPFTNFLITISSHVGLAFTSYYASRAALGLPFELRPSFSFIIAFMTVMGMTIAFAKDISDIEGDAKYGVRTVATKLGARNMTRVVSGVLLLNYLVSILAGIIWPQAFNSNVMILSHAILAFCLIFRTRELALANYASAPSRQFFEFIWNLYYAEYLVYVFI

SEQ ID NO: 281 - protein, 677 aa, Artificial Sequence
  Synthetic
MASEKEIRRERFLNVFPKLVEELNASLLAYGMPKEACDWYAHSLNYNTPGGKLNRGLSVVDTYAILSNKTVEQLGQEEYEKVAILGWCIELLQAYWLVADDMMDKSITRRGQPCWYKVPEVGEIAIWDAFMLEAAIYKLLKSHFRNEKYYIDITELFHEVTFQTELGQLMDLITAPEDKVDLSKFSLKKHSFIVTFKTAYYSFYLPVALAMYVAGITDEKDLKQARDVLIPLGEYFQIQDDYLDCFGTPEQIGKIGTDIQDNKCSWVINKALELASAEQRKTLDENYGKKDSVAEAKCKKIFNDLKIEQLYHEYEESIAKDLKAKISQVDESRGFKADVLTAFLNKVYKRSKGSGSAGSDQIEGSPHHESDNSIATKILNFGHTCWKLQRPYVVKGMISIACGLFGRELFHNTNLLSWSLMLKAFSSLMVILSFNFFAAVMNQIYDVDIDRINKPDLPLVSGEMSIETAWILSIIVALTGLILTIKLNCGPLFISLYCVSLFAGFAYSVPPIRWKQYPFTNFLITISSHVGVNFTCYYASRAAFGLPFEMSPPFTFILAFMTVMGMTIAFAKDISDIEGDAKYGVSTVATKLGARNMTFVVSGVLLLTYVSAILAAIIWPQAFKSNVMLLSHAILAFCLIFRTRELALANYASAPSRQFFEFIWKLHYAEYLVYVFI

SEQ ID NO: 282 - protein, 677 aa, Artificial Sequence
  Synthetic
MASEKEIRRERFLNVFPKLVEELNASLLAYGMPKEACDWYAHSLNYNTPGGKLNRGLSVVDTYAILSNKTVEQLGQEEYEKVAILGWCIELLQAYWLVADDMMDKSITRRGQPCWYKVPEVGEIAIWDAFMLEAAIYKLLKSHFRNEKYYIDITELFHEVTFQTELGQLMDLITAPEDKVDLSKFSLKKHSFIVTFKTAYYSFYLPVALAMYVAGITDEKDLKQARDVLIPLGEYFQIQDDYLDCFGTPEQIGKIGTDIQDNKCSWVINKALELASAEQRKTLDENYGKKDSVAEAKCKKIFNDLKIEQLYHEYEESIAKDLKAKISQVDESRGFKADVLTAFLNKVYKRSKGSGSAGSDQIEGSPHHESDNSIATKILNFGHTCWKLQRPYVVKGLISIACGLFGRELFHNTNLLSWSLMLKAFSSLMVILSFNFFAAIMNQIYDVDIDRINKPDLPLVSGEMSIETAWILSIIVALTGLILTIKLNCGPLFISLYCVSIFAGFAYSVPPIRWKQYPFTNFLITISSHVGVNFTCYYASRAAFGLPFEMSPPFTFILAFMTVMGMTIAFAKDISDIEGDAKYGVSTVATKLGARNMTFVVSGVLLLTYVSAILAAIIWPQAFKSNVMLLSHAILAFCLIFRTRELALANYASAPSRQFFEFIWKLHYAEYLVYVFI

SEQ ID NO: 283 - protein, 677 aa, Artificial Sequence
  Synthetic
MASEKEIRRERFLNVFPKLVEELNASLLAYGMPKEACDWYAHSLNYNTPGGKLNRGLSVVDTYAILSNKTVEQLGQEEYEKVAILGWCIELLQAYWLVADDMMDKSITRRGQPCWYKVPEVGEIAIWDAFMLEAAIYKLLKSHFRNEKYYIDITELFHEVTFQTELGQLMDLITAPEDKVDLSKFSLKKHSFIVTFKTAYYSFYLPVALAMYVAGITDEKDLKQARDVLIPLGEYFQIQDDYLDCFGTPEQIGKIGTDIQDNKCSWVINKALELASAEQRKTLDENYGKKDSVAEAKCKKIFNDLKIEQLYHEYEESIAKDLKAKISQVDESRGFKADVLTAFLNKVYKRSKGSGSAGSDQIEGSPHHESDNSIATKILNFGHTCWKLQRPYVVKGMISIACGLFGRELFHNTNLLSWSLMLKAFSSLMVILSFNFFAAVMNQIYDVDIDRINKPDLPLVSGEMSIETAWILSIIVALTGLILTIKLNCGPLFISLYCVSIFAGFAYSVPPIRWKQYPFTNFLITISSHVGVNFTCYYASRAAFGLPFEMSPPFTFILAFMTVMGMTIAFAKDISDIEGDAKYGVRTVATKLGARNMTFVVSGVLLLTYVSAILAAIIWPQAFKSNVMLLSHAILAFCLIFRTRELALANYASAPSRQFFEFIWKLHYAEYLVYVFI

SEQ ID NO: 284 - protein, 677 aa, Artificial Sequence
  Synthetic
MASEKEIRRERFLNVFPKLVEELNASLLAYGMPKEACDWYAHSLNYNTPGGKLNRGLSVVDTYAILSNKTVEQLGQEEYEKVAILGWCIELLQAYWLVADDMMDKSITRRGQPCWYKVPEVGEIAIWDAFMLEAAIYKLLKSHFRNEKYYIDITELFHEVTFQTELGQLMDLITAPEDKVDLSKFSLKKHSFIVTFKTAYYSFYLPVALAMYVAGITDEKDLKQARDVLIPLGEYFQIQDDYLDCFGTPEQIGKIGTDIQDNKCSWVINKALELASAEQRKTLDENYGKKDSVAEAKCKKIFNDLKIEQLYHEYEESIAKDLKAKISQVDESRGFKADVLTAFLNKVYKRSKGSGSAGSDQIEGSPHHESDNSIATKILNFGHTFWKLQRPYVVKGLISIACGLFGKELLHNTNLISWSLMFKAFFALVPILSFNFFAAVVNQIYDVEIDRINKPDLPLVSGEMSIETAWILSIIVALTGLIVTIKMKGGPLFVFIYIFGLFAGFAYSVPPIRWKQYPFTNFLITISSHVGLAFTSYYASRAALGLPFELRPSFSFIIAFMTVMGMTIAFAKDISDIEGDAKYGVRTVATKLGARNMTFVVSGVLLLNYLVSILAGIIWPQAFNSNVMILSHAILAFCLIFRTRELALANYASAPSRQFFEFIWNLYYAEYLVYVFI

SEQ ID NO: 285 - protein, 677 aa, Artificial Sequence
  Synthetic
MASEKEIRRERFLNVFPKLVEELNASLLAYGMPKEACDWYAHSLNYNTPGGKLNRGLSVVDTYAILSNKTVEQLGQEEYEKVAILGWCIELLQAYWLVADDMMDKSITRRGQPCWYKVPEVGEIAIWDAFMLEAAIYKLLKSHFRNEKYYIDITELFHEVTFQTELGQLMDLITAPEDKVDLSKFSLKKHSFIVTFKTAYYSFYLPVALAMYVAGITDEKDLKQARDVLIPLGEYFQIQDDYLDCFGTPEQIGKIGTDIQDNKCSWVINKALELASAEQRKTLDENYGKKDSVAEAKCKKIFNDLKIEQLYHEYEESIAKDLKAKISQVDESRGFKADVLTAFLNKVYKRSKGSGSAGSDQIEGSPHHESDNSIATKILNFGHTFWKLQRPYVVKGLISIACGLFGKELLHNTNLISWSLMFKAFFALVPILSFNFFAASVNQIYDVEIDRINKPDLPLVSGEMSIETAWILSIIVALTGLIVTIKMKGGPLFVFIYIFGLFAGFAYSVPPIRWKQYPFTNFLITISSHVGLAFTSYYASRAALGLPFELRPSFSFIIAFMTVMGMTIAFAKDISDIEGDAKYGVRTVATKLGARNMTFVVSGVLLLNYLVSILAGIIWPQAFNSNVMILSHAILAFCLIFRTRELALANYASAPSRQFFEFIWRLYYAEYLVYVFI

SEQ ID NO: 286 - protein, 677 aa, Artificial Sequence
  Synthetic
MASEKEIRRERFLNVFPKLVEELNASLLAYGMPKEACDWYAHSLNYNTPGGKLNRGLSVVDTYAILSNKTVEQLGQEEYEKVAILGWCIELLQAYWLVADDMMDKSITRRGQPCWYKVPEVGEIAIWDAFMLEAAIYKLLKSHFRNEKYYIDITELFHEVTFQTELGQLMDLITAPEDKVDLSKFSLKKHSFIVTFKTAYYSFYLPVALAMYVAGITDEKDLKQARDVLIPLGEYFQIQDDYLDCFGTPEQIGKIGTDIQDNKCSWVINKALELASAEQRKTLDENYGKKDSVAEAKCKKIFNDLKIEQLYHEYEESIAKDLKAKISQVDESRGFKADVLTAFLNKVYKRSKGSGSAGSDQIEGSPHHESDNSIATKILNFGHTCWKLQRPYVVKGMISIACGLFGRELFHNTNLLSWSLMLKAFSSLMVILSFNFFAAVMNQIYDVDIDRINKPDLPLVSGEMSIETAWILSIIVALTGLILTIKLNCGPLFISLYCVSIFAGFAYSVPPIRWKRYPFTNFLITISSHVGVNFTCYYASRAAFGLPFEMSPPFTFILAFMTVMGMTIAFAKDISDIEGDAKYGVSTVATKLGARNMTFVVSGVLLLTYVSAILAAIIWPQAFKSNVMLLSHAILAFCLIFRTRELALANYASAPSRQFFEFIWKLHYAEYLVYVFI

SEQ ID NO: 287 - protein, 677 aa, Artificial Sequence
  Synthetic
MASEKEIRRERFLNVFPKLVEELNASLLAYGMPKEACDWYAHSLNYNTPGGKLNRGLSVVDTYAILSNKTVEQLGQEEYEKVAILGWCIELLQAYWLVADDMMDKSITRRGQPCWYKVPEVGEIAIWDAFMLEAAIYKLLKSHFRNEKYYIDITELFHEVTFQTELGQLMDLITAPEDKVDLSKFSLKKHSFIVTFKTAYYSFYLPVALAMYVAGITDEKDLKQARDVLIPLGEYFQIQDDYLDCFGTPEQIGKIGTDIQDNKCSWVINKALELASAEQRKTLDENYGKKDSVAEAKCKKIFNDLKIEQLYHEYEESIAKDLKAKISQVDESRGFKADVLTAFLNKVYKRSKGSGSAGSDQIEGSPHHESDNSIATKILNFGHTCWKLQRPYVVKGLISIACGLFGRELFHNTNLLSWSLMLKAFSSLMVILSFNFFAASMNQIYDVDIDRINKPDLPLVSGEMSIETAWILSIIVALTGLILTIKLNCGPLFISLYCVSIFAGFAYSVPPIRWKQYPFTNFLITISSHVGVNFTCYYASRAAFGLPFEMSPPFTFILAFMTVMGMTIAFAKDISDIEGDAKYGVSTVATKLGARNMTFVVSGVLLLTYVSAILAAIIWPQAFKSNVMLLSHAILAFCLIFQTRELALANYASAPSRQFFEFIWKLHYAEYLVYVFI

SEQ ID NO: 288 - protein, 677 aa, Artificial Sequence
  Synthetic
MASEKEIRRERFLNVFPKLVEELNASLLAYGMPKEACDWYAHSLNYNTPGGKLNRGLSVVDTYAILSNKTVEQLGQEEYEKVAILGWCIELLQAYWLVADDMMDKSITRRGQPCWYKVPEVGEIAIWDAFMLEAAIYKLLKSHFRNEKYYIDITELFHEVTFQTELGQLMDLITAPEDKVDLSKFSLKKHSFIVTFKTAYYSFYLPVALAMYVAGITDEKDLKQARDVLIPLGEYFQIQDDYLDCFGTPEQIGKIGTDIQDNKCSWVINKALELASAEQRKTLDENYGKKDSVAEAKCKKIFNDLKIEQLYHEYEESIAKDLKAKISQVDESRGFKADVLTAFLNKVYKRSKGSGSAGSDQIEGSPHHESDNSIATKILNFGHTFWKLQRPYVVKGLISIACGLFGKELLHNTNLISWSLMFKAFFALVPILSFNFFAAVMNQIYDVEIDRINKPDLPLVSGEMSIETAWILSIIVALTGLIVTIKMKGGPLFVFIYIFGLFAGFAYSVPPIRWKQYPFTNFLITISSHVGLAFTSYYASRAALGLPFELRPSFSFIIAFMTVMGMTIAFAKDISDIEGDAKYGVRTVATKLGARNMTRVVSGVLLLNYLVSILAGIIWPQAFNSNVMILSHAILAFCLIFRTRELALANYASAPSRQFFEFIWNLYYAEYLVYVFI

SEQ ID NO: 289 - protein, 677 aa, Artificial Sequence
  Synthetic
MASEKEIRRERFLNVFPKLVEELNASLLAYGMPKEACDWYAHSLNYNTPGGKLNRGLSVVDTYAILSNKTVEQLGQEEYEKVAILGWCIELLQAYWLVADDMMDKSITRRGQPCWYKVPEVGEIAIWDAFMLEAAIYKLLKSHFRNEKYYIDITELFHEVTFQTELGQLMDLITAPEDKVDLSKFSLKKHSFIVTFKTAYYSFYLPVALAMYVAGITDEKDLKQARDVLIPLGEYFQIQDDYLDCFGTPEQIGKIGTDIQDNKCSWVINKALELASAEQRKTLDENYGKKDSVAEAKCKKIFNDLKIEQLYHEYEESIAKDLKAKISQVDESRGFKADVLTAFLNKVYKRSKGSGSAGSDQIEGSPHHESDNSIATKILNFGHTFWKLQRPYVVKGLISIACGLFGKELLHNTNLISWSLMFKAFFALVPILSFNFFAASMNQIYDVEIDRINKPDLPLVSGEMSIETAWILSIIVALTGLIVTIKMKGGPLFVFIYIFGLFAGFAYSVPPIRWKQYPFTNFLITISSHVGLAFTSYYASRAALGLPFELRPSFSFIIAFMTVMGMTIAFAKDISDIEGDAKYGVRTVATKLGARNMTRVVSGVLLLNYLVSILAGIIWPQAFNSNVMILSHAILAFCLIFRTRELALANYASAPSRQFFEFIWRLYYAEYLVYVFI

SEQ ID NO: 290 - protein, 677 aa, Artificial Sequence
  Synthetic
MASEKEIRRERFLNVFPKLVEELNASLLAYGMPKEACDWYAHSLNYNTPGGKLNRGLSVVDTYAILSNKTVEQLGQEEYEKVAILGWCIELLQAYWLVADDMMDKSITRRGQPCWYKVPEVGEIAIWDAFMLEAAIYKLLKSHFRNEKYYIDITELFHEVTFQTELGQLMDLITAPEDKVDLSKFSLKKHSFIVTFKTAYYSFYLPVALAMYVAGITDEKDLKQARDVLIPLGEYFQIQDDYLDCFGTPEQIGKIGTDIQDNKCSWVINKALELASAEQRKTLDENYGKKDSVAEAKCKKIFNDLKIEQLYHEYEESIAKDLKAKISQVDESRGFKADVLTAFLNKVYKRSKGSGSAGSDQIEGSPHHESDNSIATKILNFGHTCWKLQRPYVVKGLISIACGLFGRELFHNTNLLSWSLMLKAFSSLMVILSFNFFAAVMNQIYDVDIDRINKPDLPLVSGEMSIETAWILSIIVALTGLILTIKLNCGPLFISLYCVSLFAGFAYSVPPIRWKQYPFTNFLITISSHVGVNFTCYYASRAAFGLPFEMSPPFTFILAFMTVMGMTIAFAKDISDIEGDAKYGVSTVATKLGARNMTFVVSGVLLLTYVSAILAAIIWPQAFKSNVMLLSHAILAFCLIFQTRELALANYASAPSRQFFEFIWKLHYAEYLVYVFI

SEQ ID NO: 291 - protein, 677 aa, Artificial Sequence
  Synthetic
MASEKEIRRERFLNVFPKLVEELNASLLAYGMPKEACDWYAHSLNYNTPGGKLNRGLSVVDTYAILSNKTVEQLGQEEYEKVAILGWCIELLQAYWLVADDMMDKSITRRGQPCWYKVPEVGEIAIWDAFMLEAAIYKLLKSHFRNEKYYIDITELFHEVTFQTELGQLMDLITAPEDKVDLSKFSLKKHSFIVTFKTAYYSFYLPVALAMYVAGITDEKDLKQARDVLIPLGEYFQIQDDYLDCFGTPEQIGKIGTDIQDNKCSWVINKALELASAEQRKTLDENYGKKDSVAEAKCKKIFNDLKIEQLYHEYEESIAKDLKAKISQVDESRGFKADVLTAFLNKVYKRSKGSGSAGSDQIEGSPHHESDNSIATKILNFGHTFWKLQRPYVVKGLISIACGLFGKELLHNTNLISWSLMFKAFFALVPILSFNFFAASVNQIYDVDIDRINKPDLPLVSGEMSIETAWILSIIVALTGLIVTIKMKGGPLFVFIYIFGLFAGFAYSVPPIRWKQYPFTNFLITISSHVGLAFTSYYASRAALGLPFELRPSFSFIIAFMTVMGMTIAFAKDISDIEGDAKYGVRTVATKLGARNMTRVVSGVLLLNYLVSILAGIIWPQAFNSNVMILSHAILAFCLIFRTRELALANYASAPSRQFFEFIWRLYYAEYLVYVFI

SEQ ID NO: 292 - protein, 677 aa, Artificial Sequence
  Synthetic
MASEKEIRRERFLNVFPKLVEELNASLLAYGMPKEACDWYAHSLNYNTPGGKLNRGLSVVDTYAILSNKTVEQLGQEEYEKVAILGWCIELLQAYWLVADDMMDKSITRRGQPCWYKVPEVGEIAIWDAFMLEAAIYKLLKSHFRNEKYYIDITELFHEVTFQTELGQLMDLITAPEDKVDLSKFSLKKHSFIVTFKTAYYSFYLPVALAMYVAGITDEKDLKQARDVLIPLGEYFQIQDDYLDCFGTPEQIGKIGTDIQDNKCSWVINKALELASAEQRKTLDENYGKKDSVAEAKCKKIFNDLKIEQLYHEYEESIAKDLKAKISQVDESRGFKADVLTAFLNKVYKRSKGSGSAGSDQIEGSPHHESDNSIATKILNFGHTCWKLQRPYVVKGMISIACGLFGRELFHNTNLLSWSLMLKAFSSLMVILSFNFFAAVMNQIYDVDIDRINKPDLPLVSGEMSIETAWILSIIVALTGLILTIKLNCGPLFISLYCVSLFAGFAYSVPPIRWKQYPFTNFLITISSHVGVNFTCYYASRAAFGLPFEMSPPFTFILAFMTVMGMTIAFAKDISDIEGDAKYGVSTVATKLGARNMTFVVSGVLLLTYVSAILAAIIWPQAFKSNVMLLSHAILAFCLIFQTRELALANYASAPSRQFFEFIWKLHYAEYLVYVFI

SEQ ID NO: 293 - protein, 677 aa, Artificial Sequence
  Synthetic
MASEKEIRRERFLNVFPKLVEELNASLLAYGMPKEACDWYAHSLNYNTPGGKLNRGLSVVDTYAILSNKTVEQLGQEEYEKVAILGWCIELLQAYWLVADDMMDKSITRRGQPCWYKVPEVGEIAIWDAFMLEAAIYKLLKSHFRNEKYYIDITELFHEVTFQTELGQLMDLITAPEDKVDLSKFSLKKHSFIVTFKTAYYSFYLPVALAMYVAGITDEKDLKQARDVLIPLGEYFQIQDDYLDCFGTPEQIGKIGTDIQDNKCSWVINKALELASAEQRKTLDENYGKKDSVAEAKCKKIFNDLKIEQLYHEYEESIAKDLKAKISQVDESRGFKADVLTAFLNKVYKRSKGSGSAGSDQIEGSPHHESDNSIATKILNFGHTFWKLQRPYVVKGLISIACGLFGKELLHNTNLISWSLMFKAFFALVPILSFNFFAAVVNQIYDVDIDRINKPDLPLVSGEMSIETAWILSIIVALTGLIVTIKMKGGPLFVFIYIFGLFAGFAYSVPPIRWKQYPFTNFLITISSHVGLAFTSYYASRAALGLPFELRPSFSFIIAFMTVMGMTIAFAKDISDIEGDAKYGVRTVATKLGARNMTRVVSGVLLLNYLVSILAGIIWPQAFNSNVMILSHAILAFCLIFRTRELALANYASAPSRQFFEFIWNLYYAEYLVYVFI

SEQ ID NO: 294 - protein, 677 aa, Artificial Sequence
  Synthetic
MASEKEIRRERFLNVFPKLVEELNASLLAYGMPKEACDWYAHSLNYNTPGGKLNRGLSVVDTYAILSNKTVEQLGQEEYEKVAILGWCIELLQAYWLVADDMMDKSITRRGQPCWYKVPEVGEIAIWDAFMLEAAIYKLLKSHFRNEKYYIDITELFHEVTFQTELGQLMDLITAPEDKVDLSKFSLKKHSFIVTFKTAYYSFYLPVALAMYVAGITDEKDLKQARDVLIPLGEYFQIQDDYLDCFGTPEQIGKIGTDIQDNKCSWVINKALELASAEQRKTLDENYGKKDSVAEAKCKKIFNDLKIEQLYHEYEESIAKDLKAKISQVDESRGFKADVLTAFLNKVYKRSKGSGSAGSDQIEGSPHHESDNSIATKILNFGHTCWKLQRPYVVKGMISIACGLFGRELFHNTNLLSWSLMLKAFSSLMVILSFNFFAAVMNQIYDVDIDRINKPDLPLVSGEMSIETAWILSIIVALTGLILTIKLNCGPLFISLYCVSIFAGFAYSVPPIRWKQYPFTNFLITISSHVGVNFTCYYASRAAFGLPFEMSPPFTFILAFMTVMGMTIAFAKDISDIEGDAKYGVRTVATKLGARNMTFVVSGVLLLTYVSAILAAIIWPQAFKSNVMLLSHAILAFCLIFQTRELALANYASAPSRQFFEFIWKLHYAEYLVYVFI

SEQ ID NO: 295 - protein, 677 aa, Artificial Sequence
  Synthetic
MASEKEIRRERFLNVFPKLVEELNASLLAYGMPKEACDWYAHSLNYNTPGGKLNRGLSVVDTYAILSNKTVEQLGQEEYEKVAILGWCIELLQAYWLVADDMMDKSITRRGQPCWYKVPEVGEIAIWDAFMLEAAIYKLLKSHFRNEKYYIDITELFHEVTFQTELGQLMDLITAPEDKVDLSKFSLKKHSFIVTFKTAYYSFYLPVALAMYVAGITDEKDLKQARDVLIPLGEYFQIQDDYLDCFGTPEQIGKIGTDIQDNKCSWVINKALELASAEQRKTLDENYGKKDSVAEAKCKKIFNDLKIEQLYHEYEESIAKDLKAKISQVDESRGFKADVLTAFLNKVYKRSKGSGSAGSDQIEGSPHHESDNSIATKILNFGHTCWKLQRPYVVKGLISIACGLFGRELFHNTNLLSWSLMLKAFSSLMVILSFNFFAAVMNQIYDVDIDRINKPDLPLVSGEMSIETAWILSIIVALTGLILTIKLNCGPLFISLYCVSIFAGFAYSVPPIRWKQYPFTNFLITISSHVGVNFTCYYASRAAFGLPFEMSPPFTFILAFMTVMGMTIAFAKDISDIEGDAKYGVRTVATKLGARNMTFVVSGVLLLTYVSAILAAIIWPQAFKSNVMLLSHAILAFCLIFQTRELALANYASAPSRQFFEFIWKLHYAEYLVYVFI

SEQ ID NO: 296 - protein, 677 aa, Artificial Sequence
  Synthetic
MASEKEIRRERFLNVFPKLVEELNASLLAYGMPKEACDWYAHSLNYNTPGGKLNRGLSVVDTYAILSNKTVEQLGQEEYEKVAILGWCIELLQAYWLVADDMMDKSITRRGQPCWYKVPEVGEIAIWDAFMLEAAIYKLLKSHFRNEKYYIDITELFHEVTFQTELGQLMDLITAPEDKVDLSKFSLKKHSFIVTFKTAYYSFYLPVALAMYVAGITDEKDLKQARDVLIPLGEYFQIQDDYLDCFGTPEQIGKIGTDIQDNKCSWVINKALELASAEQRKTLDENYGKKDSVAEAKCKKIFNDLKIEQLYHEYEESIAKDLKAKISQVDESRGFKADVLTAFLNKVYKRSKGSGSAGSDQIEGSPHHESDNSIATKILNFGHTFWKLQRPYVVKGMISIACGLFGKELLHNTNLISWSLMFKAFFALVPILSFNFFAAVVNQIYDVEIDRINKPDLPLVSGEMSIETAWILSIIVALTGLIVTIKMKGGPLFVFIYIFGLFAGFAYSVPPIRWKQYPFTNFLITISSHVGLAFTSYYASRAALGLPFELRPSFSFIIAFMTVMGMTIAFAKDISDIEGDAKYGVRTVATKLGARNMTRVVSGVLLLNYLVSILAGIIWPQAFNSNVMILSHAILAFCLIFRTRELALANYASAPSRQFFEFIWRLYYAEYLVYVFI

SEQ ID NO: 297 - protein, 677 aa, Artificial Sequence
  Synthetic
MASEKEIRRERFLNVFPKLVEELNASLLAYGMPKEACDWYAHSLNYNTPGGKLNRGLSVVDTYAILSNKTVEQLGQEEYEKVAILGWCIELLQAYWLVADDMMDKSITRRGQPCWYKVPEVGEIAIWDAFMLEAAIYKLLKSHFRNEKYYIDITELFHEVTFQTELGQLMDLITAPEDKVDLSKFSLKKHSFIVTFKTAYYSFYLPVALAMYVAGITDEKDLKQARDVLIPLGEYFQIQDDYLDCFGTPEQIGKIGTDIQDNKCSWVINKALELASAEQRKTLDENYGKKDSVAEAKCKKIFNDLKIEQLYHEYEESIAKDLKAKISQVDESRGFKADVLTAFLNKVYKRSKGSGSAGSDQIEGSPHHESDNSIATKILNFGHTFWKLQRPYVVKGMISIACGLFGKELLHNTNLISWSLMFKAFFALVPILSFNFFAAAVNQIYDVEIDRINKPDLPLVSGEMSIETAWILSIIVALTGLIVTIKMKGGPLFVFIYIFGLFAGFAYSVPPIRWKQYPFTNFLITISSHVGLAFTSYYASRAALGLPFELRPSFSFIIAFMTVMGMTIAFAKDISDIEGDAKYGVRTVATKLGARNMTRVVSGVLLLNYLVSILAGIIWPQAFNSNVMILSHAILAFCLIFRTRELALANYASAPSRQFFEFIWNLYYAEYLVYVFI

SEQ ID NO: 298 - protein, 677 aa, Artificial Sequence
  Synthetic
MASEKEIRRERFLNVFPKLVEELNASLLAYGMPKEACDWYAHSLNYNTPGGKLNRGLSVVDTYAILSNKTVEQLGQEEYEKVAILGWCIELLQAYWLVADDMMDKSITRRGQPCWYKVPEVGEIAIWDAFMLEAAIYKLLKSHFRNEKYYIDITELFHEVTFQTELGQLMDLITAPEDKVDLSKFSLKKHSFIVTFKTAYYSFYLPVALAMYVAGITDEKDLKQARDVLIPLGEYFQIQDDYLDCFGTPEQIGKIGTDIQDNKCSWVINKALELASAEQRKTLDENYGKKDSVAEAKCKKIFNDLKIEQLYHEYEESIAKDLKAKISQVDESRGFKADVLTAFLNKVYKRSKGSGSAGSDQIEGSPHHESDNSIATKILNFGHTCWKLQRPYVVKGMISIACGLFGRELFHNTNLLSWSLMLKAFSSLMVILSFNFFAAVMNQIYDVDIDRINKPDLPLVSGEMSIETAWILSIIVALTGLILTIKLNCGPLFISLYCVSIFAGFAYSVPPIRWKRYPFTNFLITISSHVGVNFTCYYASRAAFGLPFEMSPPFTFILAFMTVMGMTIAFAKDISDIEGDAKYGVSTVATKLGARNMTFVVSGVLLLTYVSAILAAIIWPQAFKSNVMLLSHAILAFCLIFQTRELALANYASAPSRQFFEFIWKLHYAEYLVYVFI

SEQ ID NO: 299 - protein, 677 aa, Artificial Sequence
  Synthetic
MASEKEIRRERFLNVFPKLVEELNASLLAYGMPKEACDWYAHSLNYNTPGGKLNRGLSVVDTYAILSNKTVEQLGQEEYEKVAILGWCIELLQAYWLVADDMMDKSITRRGQPCWYKVPEVGEIAIWDAFMLEAAIYKLLKSHFRNEKYYIDITELFHEVTFQTELGQLMDLITAPEDKVDLSKFSLKKHSFIVTFKTAYYSFYLPVALAMYVAGITDEKDLKQARDVLIPLGEYFQIQDDYLDCFGTPEQIGKIGTDIQDNKCSWVINKALELASAEQRKTLDENYGKKDSVAEAKCKKIFNDLKIEQLYHEYEESIAKDLKAKISQVDESRGFKADVLTAFLNKVYKRSKGSGSAGSDQIEGSPHHESDNSIATKILNFGHTCWKLQRPYVVKGLISIACGLFGRELFHNTNLLSWSLMLKAFSSLMVILSFNFFAAVMNQIYDVDIDRINKPDLPLVSGEMSIETAWILSIIVALTGLILTIKLNCGPLFISLYCVSIFAGFAYSVPPIRWKRYPFTNFLITISSHVGVNFTCYYASRAAFGLPFEMSPPFTFILAFMTVMGMTIAFAKDISDIEGDAKYGVSTVATKLGARNMTFVVSGVLLLTYVSAILAAIIWPQAFKSNVMLLSHAILAFCLIFQTRELALANYASAPSRQFFEFIWKLHYAEYLVYVFI

SEQ ID NO: 300 - protein, 677 aa, Artificial Sequence
  Synthetic
MASEKEIRRERFLNVFPKLVEELNASLLAYGMPKEACDWYAHSLNYNTPGGKLNRGLSVVDTYAILSNKTVEQLGQEEYEKVAILGWCIELLQAYWLVADDMMDKSITRRGQPCWYKVPEVGEIAIWDAFMLEAAIYKLLKSHFRNEKYYIDITELFHEVTFQTELGQLMDLITAPEDKVDLSKFSLKKHSFIVTFKTAYYSFYLPVALAMYVAGITDEKDLKQARDVLIPLGEYFQIQDDYLDCFGTPEQIGKIGTDIQDNKCSWVINKALELASAEQRKTLDENYGKKDSVAEAKCKKIFNDLKIEQLYHEYEESIAKDLKAKISQVDESRGFKADVLTAFLNKVYKRSKGSGSAGSDQIEGSPHHESDNSIATKILNFGHTFWKLQRPYVVKGLISIACGLFGKELLHNTNLISWSLMFKAFFALVPILSFNFFAAAVNQIYDVEIDRINKPDLPLVSGEMSIETAWILSIIVALTGLIVTIKMKGGPLFVFIYIFGLFAGFAYSVPPIRWKQYPFTNFLITISSHVGLAFTSYYASRAALGLPFELRPSFSFIIAFMTVMGMTIAFAKDISDIEGDAKYGVRTVATKLGARNMTRVVSGVLLLNYLVSILAGIIWPQAFNSNVMILSHAILAFCLIFQTRELALANYASAPSRQFFEFIWNLYYAEYLVYVFI

SEQ ID NO: 301 - protein, 677 aa, Artificial Sequence
  Synthetic
MASEKEIRRERFLNVFPKLVEELNASLLAYGMPKEACDWYAHSLNYNTPGGKLNRGLSVVDTYAILSNKTVEQLGQEEYEKVAILGWCIELLQAYWLVADDMMDKSITRRGQPCWYKVPEVGEIAIWDAFMLEAAIYKLLKSHFRNEKYYIDITELFHEVTFQTELGQLMDLITAPEDKVDLSKFSLKKHSFIVTFKTAYYSFYLPVALAMYVAGITDEKDLKQARDVLIPLGEYFQIQDDYLDCFGTPEQIGKIGTDIQDNKCSWVINKALELASAEQRKTLDENYGKKDSVAEAKCKKIFNDLKIEQLYHEYEESIAKDLKAKISQVDESRGFKADVLTAFLNKVYKRSKGSGSAGSDQIEGSPHHESDNSIATKILNFGHTCWKLQRPYVVKGLISIACGLFGRELFHNTNLLSWSLMLKAFSSLMVILSFNFFAAVMNQIYDVDIDRINKPDLPLVSGEMSIETAWILSIIVALTGLILTIKLNCGPLFISLYCVSIFAGFAYSVPPIRWKQYPFTNFLITISSHVGVNFTCYYASRAAFGLPFEMSPPFTFILAFMTVMGMTIAFAKDISDIEGDAKYGVSTVATKLGARNMTFVVSGVLLLTYVSAILAAIIWPQAFKSNVMLLSHAILAFCLIFRTRELALANYASAPSRQFFEFIWKLHYAEYLVYVFI

SEQ ID NO: 302 - protein, 677 aa, Artificial Sequence
  Synthetic
MASEKEIRRERFLNVFPKLVEELNASLLAYGMPKEACDWYAHSLNYNTPGGKLNRGLSVVDTYAILSNKTVEQLGQEEYEKVAILGWCIELLQAYWLVADDMMDKSITRRGQPCWYKVPEVGEIAIWDAFMLEAAIYKLLKSHFRNEKYYIDITELFHEVTFQTELGQLMDLITAPEDKVDLSKFSLKKHSFIVTFKTAYYSFYLPVALAMYVAGITDEKDLKQARDVLIPLGEYFQIQDDYLDCFGTPEQIGKIGTDIQDNKCSWVINKALELASAEQRKTLDENYGKKDSVAEAKCKKIFNDLKIEQLYHEYEESIAKDLKAKISQVDESRGFKADVLTAFLNKVYKRSKGSGSAGSDQIEGSPHHESDNSIATKILNFGHTFWKLQRPYVVKGLISIACGLFGKELLHNTNLISWSLMFKAFFALVPILSFNFFAAVVNQIYDVEIDRINKPDLPLVSGEMSIETAWILSIIVALTGLIVTIKMKGGPLFVFIYIFGLFAGFAYSVPPIRWKQYPFTNFLITISSHVGLAFTSYYASRAALGLPFELRPSFSFIIAFMTVMGMTIAFAKDISDIEGDAKYGVRTVATKLGARNMTRVVSGVLLLNYLVSILAGIIWPQAFNSNVMILSHAILAFCLIFRTRELALANYASAPSRQFFEFIWLLYYAEYLVYVFI

SEQ ID NO: 303 - protein, 677 aa, Artificial Sequence
  Synthetic
MASEKEIRRERFLNVFPKLVEELNASLLAYGMPKEACDWYAHSLNYNTPGGKLNRGLSVVDTYAILSNKTVEQLGQEEYEKVAILGWCIELLQAYWLVADDMMDKSITRRGQPCWYKVPEVGEIAIWDAFMLEAAIYKLLKSHFRNEKYYIDITELFHEVTFQTELGQLMDLITAPEDKVDLSKFSLKKHSFIVTFKTAYYSFYLPVALAMYVAGITDEKDLKQARDVLIPLGEYFQIQDDYLDCFGTPEQIGKIGTDIQDNKCSWVINKALELASAEQRKTLDENYGKKDSVAEAKCKKIFNDLKIEQLYHEYEESIAKDLKAKISQVDESRGFKADVLTAFLNKVYKRSKGSGSAGSDQIEGSPHHESDNSIATKILNFGHTCWKLQRPYVVKGLISIACGLFGKELLHNTNLISWSLMFKAFFALVPILSFNFFAAAVNQIYDVEIDRINKPDLPLVSGEMSIETAWILSIIVALTGLIVTIKMKGGPLFVFIYIFGLFAGFAYSVPPIRWKQYPFTNFLITISSHVGLAFTSYYASRAALGLPFELRPSFSFIIAFMTVMGMTIAFAKDISDIEGDAKYGVRTVATKLGARNMTRVVSGVLLLNYLVSILAGIIWPQAFNSNVMILSHAILAFCLIFRTRELALANYASAPSRQFFEFIWNLYYAEYLVYVFI

SEQ ID NO: 304 - protein, 677 aa, Artificial Sequence
  Synthetic
MASEKEIRRERFLNVFPKLVEELNASLLAYGMPKEACDWYAHSLNYNTPGGKLNRGLSVVDTYAILSNKTVEQLGQEEYEKVAILGWCIELLQAYWLVADDMMDKSITRRGQPCWYKVPEVGEIAIWDAFMLEAAIYKLLKSHFRNEKYYIDITELFHEVTFQTELGQLMDLITAPEDKVDLSKFSLKKHSFIVTFKTAYYSFYLPVALAMYVAGITDEKDLKQARDVLIPLGEYFQIQDDYLDCFGTPEQIGKIGTDIQDNKCSWVINKALELASAEQRKTLDENYGKKDSVAEAKCKKIFNDLKIEQLYHEYEESIAKDLKAKISQVDESRGFKADVLTAFLNKVYKRSKGSGSAGSDQIEGSPHHESDNSIATKILNFGHTCWKLQRPYVVKGMISIACGLFGRELFHNTNLLSWSLMLKAFSSLMVILSFNFFAAAMNQIYDVDIDRINKPDLPLVSGEMSIETAWILSIIVALTGLILTIKLNCGPLFISLYCVSLFAGFAYSVPPIRWKQYPFTNFLITISSHVGVNFTCYYASRAAFGLPFEMSPPFTFILAFMTVMGMTIAFAKDISDIEGDAKYGVRTVATKLGARNMTFVVSGVLLLTYVSAILAAIIWPQAFKSNVMLLSHAILAFCLIFQTRELALANYASAPSRQFFEFIWKLHYAEYLVYVFI

SEQ ID NO: 305 - protein, 677 aa, Artificial Sequence
  Synthetic
MASEKEIRRERFLNVFPKLVEELNASLLAYGMPKEACDWYAHSLNYNTPGGKLNRGLSVVDTYAILSNKTVEQLGQEEYEKVAILGWCIELLQAYWLVADDMMDKSITRRGQPCWYKVPEVGEIAIWDAFMLEAAIYKLLKSHFRNEKYYIDITELFHEVTFQTELGQLMDLITAPEDKVDLSKFSLKKHSFIVTFKTAYYSFYLPVALAMYVAGITDEKDLKQARDVLIPLGEYFQIQDDYLDCFGTPEQIGKIGTDIQDNKCSWVINKALELASAEQRKTLDENYGKKDSVAEAKCKKIFNDLKIEQLYHEYEESIAKDLKAKISQVDESRGFKADVLTAFLNKVYKRSKGSGSAGSDQIEGSPHHESDNSIATKILNFGHTCWKLQRPYVVKGLISIACGLFGRELFHNTNLLSWSLMLKAFSSLMVILSFNFFAAVMNQIYDVDIDRINKPDLPLVSGEMSIETAWILSIIVALTGLILTIKLNCGPLFISLYCVSIFAGFAYSVPPIRWKQYPFTNFLITISSHVGVNFTCYYASRAAFGLPFEMSPPFTFILAFMTVMGMTIAFAKDISDIEGDAKYGVSTVATKLGARNMTFVVSGVLLLTYVSAILAAIIWPQAFKSNVMLLSHAILAFCLIFQTRELALANYASAPSRQFFEFIWKLHYAEYLVYVFI

SEQ ID NO: 306 - protein, 677 aa, Artificial Sequence
  Synthetic
MASEKEIRRERFLNVFPKLVEELNASLLAYGMPKEACDWYAHSLNYNTPGGKLNRGLSVVDTYAILSNKTVEQLGQEEYEKVAILGWCIELLQAYWLVADDMMDKSITRRGQPCWYKVPEVGEIAIWDAFMLEAAIYKLLKSHFRNEKYYIDITELFHEVTFQTELGQLMDLITAPEDKVDLSKFSLKKHSFIVTFKTAYYSFYLPVALAMYVAGITDEKDLKQARDVLIPLGEYFQIQDDYLDCFGTPEQIGKIGTDIQDNKCSWVINKALELASAEQRKTLDENYGKKDSVAEAKCKKIFNDLKIEQLYHEYEESIAKDLKAKISQVDESRGFKADVLTAFLNKVYKRSKGSGSAGSDQIEGSPHHESDNSIATKILNFGHTFWKLQRPYVVKGLISIACGLFGKELLHNTNLISWSLMFKAFFALVPILSFNFFAAAVNQIYDVEIDRINKPDLPLVSGEMSIETAWILSIIVALTGLIVTIKMKGGPLFVFIYIFGLFAGFAYSVPPIRWKQYPFTNFLITISSHVGLAFTSYYASRAALGLPFELRPSFSFIIAFMTVMGMTIAFAKDISDIEGDAKYGVRTVATKLGARNMTFVVSGVLLLNYLVSILAGIIWPQAFNSNVMILSHAILAFCLIFRTRELALANYASAPSRQFFEFIWNLYYAEYLVYVFI

SEQ ID NO: 307 - protein, 677 aa, Artificial Sequence
  Synthetic
MASEKEIRRERFLNVFPKLVEELNASLLAYGMPKEACDWYAHSLNYNTPGGKLNRGLSVVDTYAILSNKTVEQLGQEEYEKVAILGWCIELLQAYWLVADDMMDKSITRRGQPCWYKVPEVGEIAIWDAFMLEAAIYKLLKSHFRNEKYYIDITELFHEVTFQTELGQLMDLITAPEDKVDLSKFSLKKHSFIVTFKTAYYSFYLPVALAMYVAGITDEKDLKQARDVLIPLGEYFQIQDDYLDCFGTPEQIGKIGTDIQDNKCSWVINKALELASAEQRKTLDENYGKKDSVAEAKCKKIFNDLKIEQLYHEYEESIAKDLKAKISQVDESRGFKADVLTAFLNKVYKRSKGSGSAGSDQIEGSPHHESDNSIATKILNFGHTCWKLQRPYVVKGMISIACGLFGRELFHNTNLLSWSLMLKAFSSLMVILSFNFFAAAMNQIYDVDIDRINKPDLPLVSGEMSIETAWILSIIVALTGLILTIKLNCGPLFISLYCVSLFAGFAYSVPPIRWKRYPFTNFLITISSHVGVNFTCYYASRAAFGLPFEMSPPFTFILAFMTVMGMTIAFAKDISDIEGDAKYGVSTVATKLGARNMTFVVSGVLLLTYVSAILAAIIWPQAFKSNVMLLSHAILAFCLIFQTRELALANYASAPSRQFFEFIWKLHYAEYLVYVFI

SEQ ID NO: 308 - protein, 677 aa, Artificial Sequence
  Synthetic
MASEKEIRRERFLNVFPKLVEELNASLLAYGMPKEACDWYAHSLNYNTPGGKLNRGLSVVDTYAILSNKTVEQLGQEEYEKVAILGWCIELLQAYWLVADDMMDKSITRRGQPCWYKVPEVGEIAIWDAFMLEAAIYKLLKSHFRNEKYYIDITELFHEVTFQTELGQLMDLITAPEDKVDLSKFSLKKHSFIVTFKTAYYSFYLPVALAMYVAGITDEKDLKQARDVLIPLGEYFQIQDDYLDCFGTPEQIGKIGTDIQDNKCSWVINKALELASAEQRKTLDENYGKKDSVAEAKCKKIFNDLKIEQLYHEYEESIAKDLKAKISQVDESRGFKADVLTAFLNKVYKRSKGSGSAGSDQIEGSPHHESDNSIATKILNFGHTCWKLQRPYVVKGMISIACGLFGRELFHNTNLLSWSLMLKAFSSLMVILSFNFFAAAMNQIYDVDIDRINKPDLPLVSGEMSIETAWILSIIVALTGLILTIKLNCGPLFISLYCVSLFAGFAYSVPPIRWKQYPFTNFLITISSHVGVNFTCYYASRAAFGLPFEMSPPFTFILAFMTVMGMTIAFAKDISDIEGDAKYGVSTVATKLGARNMTFVVSGVLLLTYVSAILAAIIWPQAFKSNVMLLSHAILAFCLIFQTRELALANYASAPSRQFFEFIWKLHYAEYLVYVFI

SEQ ID NO: 309 - protein, 677 aa, Artificial Sequence
  Synthetic
MASEKEIRRERFLNVFPKLVEELNASLLAYGMPKEACDWYAHSLNYNTPGGKLNRGLSVVDTYAILSNKTVEQLGQEEYEKVAILGWCIELLQAYWLVADDMMDKSITRRGQPCWYKVPEVGEIAIWDAFMLEAAIYKLLKSHFRNEKYYIDITELFHEVTFQTELGQLMDLITAPEDKVDLSKFSLKKHSFIVTFKTAYYSFYLPVALAMYVAGITDEKDLKQARDVLIPLGEYFQIQDDYLDCFGTPEQIGKIGTDIQDNKCSWVINKALELASAEQRKTLDENYGKKDSVAEAKCKKIFNDLKIEQLYHEYEESIAKDLKAKISQVDESRGFKADVLTAFLNKVYKRSKGSGSAGSDQIEGSPHHESDNSIATKILNFGHTFWKLQRPYVVKGLISIACGLFGKELLHNTNLISWSLMFKAFFALVPILSFNFFAAVVNQIYDVEIDRINKPDLPLVSGEMSIETAWILSIIVALTGLIVTIKMKGGPLFVFIYIFGLFAGFAYSVPPIRWKQYPFTNFLITISSHVGLAFTSYYASRAALGLPFELRPSFSFIIAFMTVMGMTIAFAKDISDIEGDAKYGVRTVATKLGARNMTFVVSGVLLLNYLVSILAGIIWPQAFNSNVMILSHAILAFCLIFRTRELALANYASAPSRQFFEFIWRLYYAEYLVYVFI

SEQ ID NO: 310 - protein, 677 aa, Artificial Sequence
  Synthetic
MASEKEIRRERFLNVFPKLVEELNASLLAYGMPKEACDWYAHSLNYNTPGGKLNRGLSVVDTYAILSNKTVEQLGQEEYEKVAILGWCIELLQAYWLVADDMMDKSITRRGQPCWYKVPEVGEIAIWDAFMLEAAIYKLLKSHFRNEKYYIDITELFHEVTFQTELGQLMDLITAPEDKVDLSKFSLKKHSFIVTFKTAYYSFYLPVALAMYVAGITDEKDLKQARDVLIPLGEYFQIQDDYLDCFGTPEQIGKIGTDIQDNKCSWVINKALELASAEQRKTLDENYGKKDSVAEAKCKKIFNDLKIEQLYHEYEESIAKDLKAKISQVDESRGFKADVLTAFLNKVYKRSKGSGSAGSDQIEGSPHHESDNSIATKILNFGHTFWKLQRPYVVKGLISIACGLFGKELLHNTNLISWSLMFKAFFALVPILSFNFFAAAMNQIYDVEIDRINKPDLPLVSGEMSIETAWILSIIVALTGLIVTIKMKGGPLFVFIYIFGLFAGFAYSVPPIRWKQYPFTNFLITISSHVGLAFTSYYASRAALGLPFELRPSFSFIIAFMTVMGMTIAFAKDISDIEGDAKYGVRTVATKLGARNMTRVVSGVLLLNYLVSILAGIIWPQAFNSNVMILSHAILAFCLIFRTRELALANYASAPSRQFFEFIWNLYYAEYLVYVFI

SEQ ID NO: 311 - protein, 677 aa, Artificial Sequence
  Synthetic
MASEKEIRRERFLNVFPKLVEELNASLLAYGMPKEACDWYAHSLNYNTPGGKLNRGLSVVDTYAILSNKTVEQLGQEEYEKVAILGWCIELLQAYWLVADDMMDKSITRRGQPCWYKVPEVGEIAIWDAFMLEAAIYKLLKSHFRNEKYYIDITELFHEVTFQTELGQLMDLITAPEDKVDLSKFSLKKHSFIVTFKTAYYSFYLPVALAMYVAGITDEKDLKQARDVLIPLGEYFQIQDDYLDCFGTPEQIGKIGTDIQDNKCSWVINKALELASAEQRKTLDENYGKKDSVAEAKCKKIFNDLKIEQLYHEYEESIAKDLKAKISQVDESRGFKADVLTAFLNKVYKRSKGSGSAGSDQIEGSPHHESDNSIATKILNFGHTCWKLQRPYVVKGMISIACGLFGRELFHNTNLLSWSLMLKAFSSLMVILSFNFFAAAMNQIYDVDIDRINKPDLPLVSGEMSIETAWILSIIVALTGLILTIKLNCGPLFISLYCVSLFAGFAYSVPPIRWKQYPFTNFLITISSHVGVNFTCYYASRAAFGLPFEMSPPFTFILAFMTVMGMTIAFAKDISDIEGDAKYGVSTVATKLGARNMTFVVSGVLLLTYVSAILAAIIWPQAFKSNVMLLSHAILAFCLIFRTRELALANYASAPSRQFFEFIWKLHYAEYLVYVFI

SEQ ID NO: 312 - protein, 677 aa, Artificial Sequence
  Synthetic
MASEKEIRRERFLNVFPKLVEELNASLLAYGMPKEACDWYAHSLNYNTPGGKLNRGLSVVDTYAILSNKTVEQLGQEEYEKVAILGWCIELLQAYWLVADDMMDKSITRRGQPCWYKVPEVGEIAIWDAFMLEAAIYKLLKSHFRNEKYYIDITELFHEVTFQTELGQLMDLITAPEDKVDLSKFSLKKHSFIVTFKTAYYSFYLPVALAMYVAGITDEKDLKQARDVLIPLGEYFQIQDDYLDCFGTPEQIGKIGTDIQDNKCSWVINKALELASAEQRKTLDENYGKKDSVAEAKCKKIFNDLKIEQLYHEYEESIAKDLKAKISQVDESRGFKADVLTAFLNKVYKRSKGSGSAGSDQIEGSPHHESDNSIATKILNFGHTCWKLQRPYVVKGMISIACGLFGRELFHNTNLLSWSLMLKAFSSLMVILSFNFFAAAMNQIYDVDIDRINKPDLPLVSGEMSIETAWILSIIVALTGLILTIKLNCGPLFISLYCVSIFAGFAYSVPPIRWKQYPFTNFLITISSHVGVNFTCYYASRAAFGLPFEMSPPFTFILAFMTVMGMTIAFAKDISDIEGDAKYGVRTVATKLGARNMTFVVSGVLLLTYVSAILAAIIWPQAFKSNVMLLSHAILAFCLIFQTRELALANYASAPSRQFFEFIWKLHYAEYLVYVFI

SEQ ID NO: 313 - protein, 677 aa, Artificial Sequence
  Synthetic
MASEKEIRRERFLNVFPKLVEELNASLLAYGMPKEACDWYAHSLNYNTPGGKLNRGLSVVDTYAILSNKTVEQLGQEEYEKVAILGWCIELLQAYWLVADDMMDKSITRRGQPCWYKVPEVGEIAIWDAFMLEAAIYKLLKSHFRNEKYYIDITELFHEVTFQTELGQLMDLITAPEDKVDLSKFSLKKHSFIVTFKTAYYSFYLPVALAMYVAGITDEKDLKQARDVLIPLGEYFQIQDDYLDCFGTPEQIGKIGTDIQDNKCSWVINKALELASAEQRKTLDENYGKKDSVAEAKCKKIFNDLKIEQLYHEYEESIAKDLKAKISQVDESRGFKADVLTAFLNKVYKRSKGSGSAGSDQIEGSPHHESDNSIATKILNFGHTFWKLQRPYVVKGLISIACGLFGKELLHNTNLISWSLMFKAFFALVPILSFNFFAAAVNQIYDVDIDRINKPDLPLVSGEMSIETAWILSIIVALTGLIVTIKMKGGPLFVFIYIFGLFAGFAYSVPPIRWKQYPFTNFLITISSHVGLAFTSYYASRAALGLPFELRPSFSFIIAFMTVMGMTIAFAKDISDIEGDAKYGVRTVATKLGARNMTRVVSGVLLLNYLVSILAGIIWPQAFNSNVMILSHAILAFCLIFRTRELALANYASAPSRQFFEFIWNLYYAEYLVYVFI

SEQ ID NO: 314 - protein, 677 aa, Artificial Sequence
  Synthetic
MASEKEIRRERFLNVFPKLVEELNASLLAYGMPKEACDWYAHSLNYNTPGGKLNRGLSVVDTYAILSNKTVEQLGQEEYEKVAILGWCIELLQAYWLVADDMMDKSITRRGQPCWYKVPEVGEIAIWDAFMLEAAIYKLLKSHFRNEKYYIDITELFHEVTFQTELGQLMDLITAPEDKVDLSKFSLKKHSFIVTFKTAYYSFYLPVALAMYVAGITDEKDLKQARDVLIPLGEYFQIQDDYLDCFGTPEQIGKIGTDIQDNKCSWVINKALELASAEQRKTLDENYGKKDSVAEAKCKKIFNDLKIEQLYHEYEESIAKDLKAKISQVDESRGFKADVLTAFLNKVYKRSKGSGSAGSDQIEGSPHHESDNSIATKILNFGHTCWKLQRPYVVKGMISIACGLFGRELFHNTNLLSWSLMLKAFSSLMVILSFNFFAAAMNQIYDVDIDRINKPDLPLVSGEMSIETAWILSIIVALTGLILTIKLNCGPLFISLYCVSIFAGFAYSVPPIRWKQYPFTNFLITISSHVGVNFTCYYASRAAFGLPFEMSPPFTFILAFMTVMGMTIAFAKDISDIEGDAKYGVRTVATKLGARNMTFVVSGVLLLTYVSAILAAIIWPQAFKSNVMLLSHAILAFCLIFRTRELALANYASAPSRQFFEFIWKLHYAEYLVYVFI

SEQ ID NO: 315 - protein, 677 aa, Artificial Sequence
  Synthetic
MASEKEIRRERFLNVFPKLVEELNASLLAYGMPKEACDWYAHSLNYNTPGGKLNRGLSVVDTYAILSNKTVEQLGQEEYEKVAILGWCIELLQAYWLVADDMMDKSITRRGQPCWYKVPEVGEIAIWDAFMLEAAIYKLLKSHFRNEKYYIDITELFHEVTFQTELGQLMDLITAPEDKVDLSKFSLKKHSFIVTFKTAYYSFYLPVALAMYVAGITDEKDLKQARDVLIPLGEYFQIQDDYLDCFGTPEQIGKIGTDIQDNKCSWVINKALELASAEQRKTLDENYGKKDSVAEAKCKKIFNDLKIEQLYHEYEESIAKDLKAKISQVDESRGFKADVLTAFLNKVYKRSKGSGSAGSDQIEGSPHHESDNSIATKILNFGHTCWKLQRPYVVKGMISIACGLFGRELFHNTNLLSWSLMLKAFSSLMVILSFNFFAAAMNQIYDVDIDRINKPDLPLVSGEMSIETAWILSIIVALTGLILTIKLNCGPLFISLYCVSIFAGFAYSVPPIRWKRYPFTNFLITISSHVGVNFTCYYASRAAFGLPFEMSPPFTFILAFMTVMGMTIAFAKDISDIEGDAKYGVSTVATKLGARNMTFVVSGVLLLTYVSAILAAIIWPQAFKSNVMLLSHAILAFCLIFQTRELALANYASAPSRQFFEFIWKLHYAEYLVYVFI

SEQ ID NO: 316 - protein, 677 aa, Artificial Sequence
  Synthetic
MASEKEIRRERFLNVFPKLVEELNASLLAYGMPKEACDWYAHSLNYNTPGGKLNRGLSVVDTYAILSNKTVEQLGQEEYEKVAILGWCIELLQAYWLVADDMMDKSITRRGQPCWYKVPEVGEIAIWDAFMLEAAIYKLLKSHFRNEKYYIDITELFHEVTFQTELGQLMDLITAPEDKVDLSKFSLKKHSFIVTFKTAYYSFYLPVALAMYVAGITDEKDLKQARDVLIPLGEYFQIQDDYLDCFGTPEQIGKIGTDIQDNKCSWVINKALELASAEQRKTLDENYGKKDSVAEAKCKKIFNDLKIEQLYHEYEESIAKDLKAKISQVDESRGFKADVLTAFLNKVYKRSKGSGSAGSDQIEGSPHHESDNSIATKILNFGHTFWKLQRPYVVKGLISIACGLFGKELLHNTNLISWSLMFKAFFALVPILSFNFFAAVVNQIYDVDIDRINKPDLPLVSGEMSIETAWILSIIVALTGLIVTIKMKGGPLFVFIYIFGLFAGFAYSVPPIRWKQYPFTNFLITISSHVGLAFTSYYASRAALGLPFELRPSFSFIIAFMTVMGMTIAFAKDISDIEGDAKYGVRTVATKLGARNMTRVVSGVLLLNYLVSILAGIIWPQAFNSNVMILSHAILAFCLIFRTRELALANYASAPSRQFFEFIWRLYYAEYLVYVFI

SEQ ID NO: 317 - protein, 677 aa, Artificial Sequence
  Synthetic
MASEKEIRRERFLNVFPKLVEELNASLLAYGMPKEACDWYAHSLNYNTPGGKLNRGLSVVDTYAILSNKTVEQLGQEEYEKVAILGWCIELLQAYWLVADDMMDKSITRRGQPCWYKVPEVGEIAIWDAFMLEAAIYKLLKSHFRNEKYYIDITELFHEVTFQTELGQLMDLITAPEDKVDLSKFSLKKHSFIVTFKTAYYSFYLPVALAMYVAGITDEKDLKQARDVLIPLGEYFQIQDDYLDCFGTPEQIGKIGTDIQDNKCSWVINKALELASAEQRKTLDENYGKKDSVAEAKCKKIFNDLKIEQLYHEYEESIAKDLKAKISQVDESRGFKADVLTAFLNKVYKRSKGSGSAGSDQIEGSPHHESDNSIATKILNFGHTCWKLQRPYVVKGMISIACGLFGRELFHNTNLLSWSLMLKAFSSLMVILSFNFFAAIMNQIYDVDIDRINKPDLPLVSGEMSIETAWILSIIVALTGLILTIKLNCGPLFISLYCVSLFAGFAYSVPPIRWKQYPFTNFLITISSHVGVNFTCYYASRAAFGLPFEMSPPFTFILAFMTVMGMTIAFAKDISDIEGDAKYGVRTVATKLGARNMTFVVSGVLLLTYVSAILAAIIWPQAFKSNVMLLSHAILAFCLIFRTRELALANYASAPSRQFFEFIWKLHYAEYLVYVFI

SEQ ID NO: 318 - protein, 677 aa, Artificial Sequence
  Synthetic
MASEKEIRRERFLNVFPKLVEELNASLLAYGMPKEACDWYAHSLNYNTPGGKLNRGLSVVDTYAILSNKTVEQLGQEEYEKVAILGWCIELLQAYWLVADDMMDKSITRRGQPCWYKVPEVGEIAIWDAFMLEAAIYKLLKSHFRNEKYYIDITELFHEVTFQTELGQLMDLITAPEDKVDLSKFSLKKHSFIVTFKTAYYSFYLPVALAMYVAGITDEKDLKQARDVLIPLGEYFQIQDDYLDCFGTPEQIGKIGTDIQDNKCSWVINKALELASAEQRKTLDENYGKKDSVAEAKCKKIFNDLKIEQLYHEYEESIAKDLKAKISQVDESRGFKADVLTAFLNKVYKRSKGSGSAGSDQIEGSPHHESDNSIATKILNFGHTCWKLQRPYVVKGMISIACGLFGRELFHNTNLLSWSLMLKAFSSLMVILSFNFFAAAMNQIYDVDIDRINKPDLPLVSGEMSIETAWILSIIVALTGLILTIKLNCGPLFISLYCVSIFAGFAYSVPPIRWKRYPFTNFLITISSHVGVNFTCYYASRAAFGLPFEMSPPFTFILAFMTVMGMTIAFAKDISDIEGDAKYGVSTVATKLGARNMTFVVSGVLLLTYVSAILAAIIWPQAFKSNVMLLSHAILAFCLIFRTRELALANYASAPSRQFFEFIWKLHYAEYLVYVFI

SEQ ID NO: 319 - protein, 677 aa, Artificial Sequence
  Synthetic
MASEKEIRRERFLNVFPKLVEELNASLLAYGMPKEACDWYAHSLNYNTPGGKLNRGLSVVDTYAILSNKTVEQLGQEEYEKVAILGWCIELLQAYWLVADDMMDKSITRRGQPCWYKVPEVGEIAIWDAFMLEAAIYKLLKSHFRNEKYYIDITELFHEVTFQTELGQLMDLITAPEDKVDLSKFSLKKHSFIVTFKTAYYSFYLPVALAMYVAGITDEKDLKQARDVLIPLGEYFQIQDDYLDCFGTPEQIGKIGTDIQDNKCSWVINKALELASAEQRKTLDENYGKKDSVAEAKCKKIFNDLKIEQLYHEYEESIAKDLKAKISQVDESRGFKADVLTAFLNKVYKRSKGSGSAGSDQIEGSPHHESDNSIATKILNFGHTCWKLQRPYVVKGMISIACGLFGRELFHNTNLLSWSLMLKAFSSLMVILSFNFFAAAMNQIYDVDIDRINKPDLPLVSGEMSIETAWILSIIVALTGLILTIKLNCGPLFISLYCVSIFAGFAYSVPPIRWKQYPFTNFLITISSHVGVNFTCYYASRAAFGLPFEMSPPFTFILAFMTVMGMTIAFAKDISDIEGDAKYGVSTVATKLGARNMTFVVSGVLLLTYVSAILAAIIWPQAFKSNVMLLSHAILAFCLIFRTRELALANYASAPSRQFFEFIWKLHYAEYLVYVFI

SEQ ID NO: 320 - protein, 677 aa, Artificial Sequence
  Synthetic
MASEKEIRRERFLNVFPKLVEELNASLLAYGMPKEACDWYAHSLNYNTPGGKLNRGLSVVDTYAILSNKTVEQLGQEEYEKVAILGWCIELLQAYWLVADDMMDKSITRRGQPCWYKVPEVGEIAIWDAFMLEAAIYKLLKSHFRNEKYYIDITELFHEVTFQTELGQLMDLITAPEDKVDLSKFSLKKHSFIVTFKTAYYSFYLPVALAMYVAGITDEKDLKQARDVLIPLGEYFQIQDDYLDCFGTPEQIGKIGTDIQDNKCSWVINKALELASAEQRKTLDENYGKKDSVAEAKCKKIFNDLKIEQLYHEYEESIAKDLKAKISQVDESRGFKADVLTAFLNKVYKRSKGSGSAGSDQIEGSPHHESDNSIATKILNFGHTFWKLQRPYVVKGMISIACGLFGKELLHNTNLISWSLMFKAFFALVPILSFNFFAAAVNQIYDVEIDRINKPDLPLVSGEMSIETAWILSIIVALTGLIVTIKMKGGPLFVFIYIFGLFAGFAYSVPPIRWKQYPFTNFLITISSHVGLAFTSYYASRAALGLPFELRPSFSFIIAFMTVMGMTIAFAKDISDIEGDAKYGVRTVATKLGARNMTRVVSGVLLLNYLVSILAGIIWPQAFNSNVMILSHAILAFCLIFRTRELALANYASAPSRQFFEFIWRLYYAEYLVYVFI

SEQ ID NO: 321 - protein, 677 aa, Artificial Sequence
  Synthetic
MASEKEIRRERFLNVFPKLVEELNASLLAYGMPKEACDWYAHSLNYNTPGGKLNRGLSVVDTYAILSNKTVEQLGQEEYEKVAILGWCIELLQAYWLVADDMMDKSITRRGQPCWYKVPEVGEIAIWDAFMLEAAIYKLLKSHFRNEKYYIDITELFHEVTFQTELGQLMDLITAPEDKVDLSKFSLKKHSFIVTFKTAYYSFYLPVALAMYVAGITDEKDLKQARDVLIPLGEYFQIQDDYLDCFGTPEQIGKIGTDIQDNKCSWVINKALELASAEQRKTLDENYGKKDSVAEAKCKKIFNDLKIEQLYHEYEESIAKDLKAKISQVDESRGFKADVLTAFLNKVYKRSKGSGSAGSDQIEGSPHHESDNSIATKILNFGHTCWKLQRPYVVKGMISIACGLFGRELFHNTNLLSWSLMLKAFSSLMVILSFNFFAASMNQIYDVDIDRINKPDLPLVSGEMSIETAWILSIIVALTGLILTIKLNCGPLFISLYCVSLFAGFAYSVPPIRWKQYPFTNFLITISSHVGVNFTCYYASRAAFGLPFEMSPPFTFILAFMTVMGMTIAFAKDISDIEGDAKYGVRTVATKLGARNMTFVVSGVLLLTYVSAILAAIIWPQAFKSNVMLLSHAILAFCLIFQTRELALANYASAPSRQFFEFIWKLHYAEYLVYVFI

SEQ ID NO: 322 - protein, 677 aa, Artificial Sequence
  Synthetic
MASEKEIRRERFLNVFPKLVEELNASLLAYGMPKEACDWYAHSLNYNTPGGKLNRGLSVVDTYAILSNKTVEQLGQEEYEKVAILGWCIELLQAYWLVADDMMDKSITRRGQPCWYKVPEVGEIAIWDAFMLEAAIYKLLKSHFRNEKYYIDITELFHEVTFQTELGQLMDLITAPEDKVDLSKFSLKKHSFIVTFKTAYYSFYLPVALAMYVAGITDEKDLKQARDVLIPLGEYFQIQDDYLDCFGTPEQIGKIGTDIQDNKCSWVINKALELASAEQRKTLDENYGKKDSVAEAKCKKIFNDLKIEQLYHEYEESIAKDLKAKISQVDESRGFKADVLTAFLNKVYKRSKGSGSAGSDQIEGSPHHESDNSIATKILNFGHTCWKLQRPYVVKGLISIACGLFGRELFHNTNLLSWSLMLKAFSSLMVILSFNFFAAAMNQIYDVDIDRINKPDLPLVSGEMSIETAWILSIIVALTGLILTIKLNCGPLFISLYCVSIFAGFAYSVPPIRWKQYPFTNFLITISSHVGVNFTCYYASRAAFGLPFEMSPPFTFILAFMTVMGMTIAFAKDISDIEGDAKYGVRTVATKLGARNMTFVVSGVLLLTYVSAILAAIIWPQAFKSNVMLLSHAILAFCLIFQTRELALANYASAPSRQFFEFIWKLHYAEYLVYVFI

SEQ ID NO: 323 - protein, 677 aa, Artificial Sequence
  Synthetic
MASEKEIRRERFLNVFPKLVEELNASLLAYGMPKEACDWYAHSLNYNTPGGKLNRGLSVVDTYAILSNKTVEQLGQEEYEKVAILGWCIELLQAYWLVADDMMDKSITRRGQPCWYKVPEVGEIAIWDAFMLEAAIYKLLKSHFRNEKYYIDITELFHEVTFQTELGQLMDLITAPEDKVDLSKFSLKKHSFIVTFKTAYYSFYLPVALAMYVAGITDEKDLKQARDVLIPLGEYFQIQDDYLDCFGTPEQIGKIGTDIQDNKCSWVINKALELASAEQRKTLDENYGKKDSVAEAKCKKIFNDLKIEQLYHEYEESIAKDLKAKISQVDESRGFKADVLTAFLNKVYKRSKGSGSAGSDQIEGSPHHESDNSIATKILNFGHTFWKLQRPYVVKGLISIACGLFGKELLHNTNLISWSLMFKAFFALVPILSFNFFAAAVNQIYDVEIDRINKPDLPLVSGEMSIETAWILSIIVALTGLIVTIKMKGGPLFVFIYIFGLFAGFAYSVPPIRWKQYPFTNFLITISSHVGLAFTSYYASRAALGLPFELRPSFSFIIAFMTVMGMTIAFAKDISDIEGDAKYGVRTVATKLGARNMTRVVSGVLLLNYLVSILAGIIWPQAFNSNVMILSHAILAFCLIFRTRELALANYASAPSRQFFEFIWLLYYAEYLVYVFI

SEQ ID NO: 324 - protein, 677 aa, Artificial Sequence
  Synthetic
MASEKEIRRERFLNVFPKLVEELNASLLAYGMPKEACDWYAHSLNYNTPGGKLNRGLSVVDTYAILSNKTVEQLGQEEYEKVAILGWCIELLQAYWLVADDMMDKSITRRGQPCWYKVPEVGEIAIWDAFMLEAAIYKLLKSHFRNEKYYIDITELFHEVTFQTELGQLMDLITAPEDKVDLSKFSLKKHSFIVTFKTAYYSFYLPVALAMYVAGITDEKDLKQARDVLIPLGEYFQIQDDYLDCFGTPEQIGKIGTDIQDNKCSWVINKALELASAEQRKTLDENYGKKDSVAEAKCKKIFNDLKIEQLYHEYEESIAKDLKAKISQVDESRGFKADVLTAFLNKVYKRSKGSGSAGSDQIEGSPHHESDNSIATKILNFGHTCWKLQRPYVVKGMISIACGLFGRELFHNTNLLSWSLMLKAFSSLMVILSFNFFAASMNQIYDVDIDRINKPDLPLVSGEMSIETAWILSIIVALTGLILTIKLNCGPLFISLYCVSLFAGFAYSVPPIRWKQYPFTNFLITISSHVGVNFTCYYASRAAFGLPFEMSPPFTFILAFMTVMGMTIAFAKDISDIEGDAKYGVSTVATKLGARNMTFVVSGVLLLTYVSAILAAIIWPQAFKSNVMLLSHAILAFCLIFRTRELALANYASAPSRQFFEFIWKLHYAEYLVYVFI

SEQ ID NO: 325 - DNA, 2034 bp, Artificial Sequence
  Synthetic
atggcttcagaaaaagaaattaggagagagagattcttgaacgttttccctaaattagtagaggaattgaacgcatcgcttttggcttacggtatgcctaaggaagcatgtgactggtatgcccactcattgaactacaacactccaggcggtaagctaaatagaggtttgtccgttgtggacacgtatgctattctctccaacaagaccgttgaacaattggggcaagaagaatacgaaaaggttgccattctaggttggtgcattgagttgttgcaggcttactggttggtcgccgatgatatgatggacaagtccattaccagaagaggccaaccatgttggtacaaggttcctgaagttggggaaattgccatctgggacgcattcatgttagaggctgctatctacaagcttttgaaatctcacttcagaaacgaaaaatactacatagatatcaccgaattgttccatgaggtcaccttccaaaccgaattgggccaattgatggacttaatcactgcacctgaagacaaagtcgacttgagtaagttctccctaaagaagcactccttcatagttactttcaagactgcttactattctttctacttgcctgtcgcattggccatgtacgttgccggtatcacggatgaaaaggatttgaaacaagccagagatgtcttgattccattgggtgaatacttccaaattcaagatgactacttagactgcttcggtaccccagaacagatcggtaagatcggtacagatatccaagataacaaatgttcttgggtaatcaacaaggcattggaacttgcttccgcagaacaaagaaagactttagacgaaaattacggtaagaaggactcagtcgcagaagccaaatgcaaaaagattttcaatgacttgaaaattgaacagctataccacgaatatgaagagtctattgccaaggatttgaaggccaaaatttctcaggtcgatgagtctcgtggcttcaaagctgatgtcttaactgcgttcttgaacaaagtttacaagagaagcaaaggttctggatctgcaggaagtgatcagatagaaggcagcccccaccatgagtccgacaattcgatcgccacaaagattttaaactttggtcatacctgttggaaacttcaaaggccttacgtcgttaaagggatgatttctatcgcgtgcggtctattcggtcgcgaactgttgcacaatacgaacttaatatcatggagtctcatgtttaaggctttctttgctttggtaccaattctgtcattcaatttttttgcagccataatgaaccaaatttatgatgtggacatcgatagaattaataaaccggatttacctttggtttctggggagatgtcaatagaaactgcttggatactatccattatcgtggcactaacaggccttattgttactattaaaatgaagggtggaccactttttgtattcatatatatcttcggtatttttgcgggcttcgcttactcggtcccaccgatcagatggaaacagtatccttttacgaacttcttaatcactatttcatcgcatgttggattagcttttacctcttattacgccagtcgtgcagctttgggtttgccatttgaattgcggccaagcttcagcttcatcatagcctttatgacagttatgggtatgactattgcatttgcgaaagacatatccgatattgaaggcgacgccaagtatggtgtgtctaccgtagcaacaaagctgggggctcgaaatatgacttttgtcgtcagtggagttctgttgttaaactaccttgtatcaattagtgctggcattatatggccacaagcatttaattctaatattatgatcctgtcacacgctattttagcgttctgtttgatctttcaaacaagggagcttgcattggcgaattatgcttctgcaccctccaggcagttctttgaatttatatggttactgtattacgcagagtacctagtgtatgttttcatttaa

SEQ ID NO: 326 - DNA, 2034 bp, Artificial Sequence
  Synthetic
atggcttcagaaaaagaaattaggagagagagattcttgaacgttttccctaaattagtagaggaattgaacgcatcgcttttggcttacggtatgcctaaggaagcatgtgactggtatgcccactcattgaactacaacactccaggcggtaagctaaatagaggtttgtccgttgtggacacgtatgctattctctccaacaagaccgttgaacaattggggcaagaagaatacgaaaaggttgccattctaggttggtgcattgagttgttgcaggcttactggttggtcgccgatgatatgatggacaagtccattaccagaagaggccaaccatgttggtacaaggttcctgaagttggggaaattgccatctgggacgcattcatgttagaggctgctatctacaagcttttgaaatctcacttcagaaacgaaaaatactacatagatatcaccgaattgttccatgaggtcaccttccaaaccgaattgggccaattgatggacttaatcactgcacctgaagacaaagtcgacttgagtaagttctccctaaagaagcactccttcatagttactttcaagactgcttactattctttctacttgcctgtcgcattggccatgtacgttgccggtatcacggatgaaaaggatttgaaacaagccagagatgtcttgattccattgggtgaatacttccaaattcaagatgactacttagactgcttcggtaccccagaacagatcggtaagatcggtacagatatccaagataacaaatgttcttgggtaatcaacaaggcattggaacttgcttccgcagaacaaagaaagactttagacgaaaattacggtaagaaggactcagtcgcagaagccaaatgcaaaaagattttcaatgacttgaaaattgaacagctataccacgaatatgaagagtctattgccaaggatttgaaggccaaaatttctcaggtcgatgagtctcgtggcttcaaagctgatgtcttaactgcgttcttgaacaaagtttacaagagaagcaaaggttctggatctgcaggaagtgatcagatagaaggcagcccccaccatgagtccgacaattcgatcgccacaaagattttaaactttggtcatacctgttggaaacttcaaaggccttacgtcgttaaagggatgatttctatcgcgtgcggtctattcggtcgcgaactgttgcacaatacgaacttaatatcatggagtctcatgtttaaggctttctttgctttggtaccaattctgtcattcaatttttttgcagccataatgaaccaaatttatgatgtggacatcgatagaattaataaaccggatttacctttggtttctggggagatgtcaatagaaactgcttggatactatccattatcgtggcactaacaggccttattgttactattaaaatgaagggtggaccactttttgtattcatatatatcttcggtatttttgcgggcttcgcttactcggtcccaccgatcagatggaaacagtatccttttacgaacttcttaatcactatttcatcgcatgttggattagcttttacctcttattacgccagtcgtgcagctttgggtttgccatttgaattgcggccaagcttcagcttcatcatagcctttatgacagttatgggtatgactattgcatttgcgaaagacatatccgatattgaaggcgacgccaagtatggtgtgtctaccgtagcaacaaagctgggggctcgaaatatgactagagtcgtcagtggagttctgttgttaaactaccttgtatcaattagtgctggcattatatggccacaagcatttaattctaatattatgatcctgtcacacgctattttagcgttctgtttgatctttcaaacaagggagcttgcattggcgaattatgcttctgcaccctccaggcagttctttgaatttatatggttactgtattacgcagagtacctagtgtatgttttcatttaa

SEQ ID NO: 327 - DNA, 2028 bp, Artificial Sequence
  Synthetic
atggcttcagaaaaagaaattaggagagagagattcttgaacgttttccctaaattagtagaggaattgaacgcatcgcttttggcttacggtatgcctaaggaagcatgtgactggtatgcccactcattgaactacaacactccaggcggtaagctaaatagaggtttgtccgttgtggacacgtatgctattctctccaacaagaccgttgaacaattggggcaagaagaatacgaaaaggttgccattctaggttggtgcattgagttgttgcaggcttactggttggtcgccgatgatatgatggacaagtccattaccagaagaggccaaccatgttggtacaaggttcctgaagttggggaaattgccatctgggacgcattcatgttagaggctgctatctacaagcttttgaaatctcacttcagaaacgaaaaatactacatagatatcaccgaattgttccatgaggtcaccttccaaaccgaattgggccaattgatggacttaatcactgcacctgaagacaaagtcgacttgagtaagttctccctaaagaagcactccttcatagttactttcaagactgcttactattctttctacttgcctgtcgcattggccatgtacgttgccggtatcacggatgaaaaggatttgaaacaagccagagatgtcttgattccattgggtgaatacttccaaattcaagatgactacttagactgcttcggtaccccagaacagatcggtaagatcggtacagatatccaagataacaaatgttcttgggtaatcaacaaggcattggaacttgcttccgcagaacaaagaaagactttagacgaaaattacggtaagaaggactcagtcgcagaagccaaatgcaaaaagattttcaatgacttgaaaattgaacagctataccacgaatatgaagagtctattgccaaggatttgaaggccaaaatttctcaggtcgatgagtctcgtggcttcaaagctgatgtcttaactgcgttcttgaacaaagtttacaagagaagcaaaggttctggatccgcgggttcggaccagattgaggggagtccccaccatgaatcagataacagcatcgccacgaaaatattgaattttggacatacctgttggaagcttcaacgaccgtacgtagtcaaaggcatgatttctatagcatgcggactattcggtcgggaactctttcacaatactaacctgttatcttggtcgttaatgttgaaggctttctcttcattgatggttatcctatcctttaattttttcgctgctattatgaaccaaatatatgatgtggacattgatcgtattaataaaccagatcttcctttagttagtggtgagatgtcaatcgaaacagcctggatactatctatcattgtggcactgacaggcttgattttaactatcaaactcaattgtgggccactatttatctcattatattgcgttagcatattcgctggatttgcgtactctgtccctcctataaggtggaagcaatatccattcaccaactttctgattactatttcctcacatgtaggtgttaattttacatgttactatgcaagtcgcgcagcctttggtttgccctttgaaatgtcgccacccttcactttcatcttggcgtttatgacggtgatgggtatgacaattgctttcgctaaggacatatcagatattgaaggtgatgctaaatacggggtcagcactgttgcaaccaaattaggcgccagaaatatgacgttcgtagtaagcggtgttttacttttaacctatgtgtctgctattttggcagcaataatctggcctttcctgtggagcaaggttgtgacagtactcggccacacaatattggcctccatcttgtggactaacgcgaagagtgtcgatctctccagtaaagccgcaattacctcattttacatgttcatctggaagctattttatgctgagtatttattaattccgctggtcaga

SEQ ID NO: 328 - DNA, 2031 bp, Artificial Sequence
  Synthetic
atggcttcagaaaaagaaattaggagagagagattcttgaacgttttccctaaattagtagaggaattgaacgcatcgcttttggcttacggtatgcctaaggaagcatgtgactggtatgcccactcattgaactacaacactccaggcggtaagctaaatagaggtttgtccgttgtggacacgtatgctattctctccaacaagaccgttgaacaattggggcaagaagaatacgaaaaggttgccattctaggttggtgcattgagttgttgcaggcttactggttggtcgccgatgatatgatggacaagtccattaccagaagaggccaaccatgttggtacaaggttcctgaagttggggaaattgccatctgggacgcattcatgttagaggctgctatctacaagcttttgaaatctcacttcagaaacgaaaaatactacatagatatcaccgaattgttccatgaggtcaccttccaaaccgaattgggccaattgatggacttaatcactgcacctgaagacaaagtcgacttgagtaagttctccctaaagaagcactccttcatagttactttcaagactgcttactattctttctacttgcctgtcgcattggccatgtacgttgccggtatcacggatgaaaaggatttgaaacaagccagagatgtcttgattccattgggtgaatacttccaaattcaagatgactacttagactgcttcggtaccccagaacagatcggtaagatcggtacagatatccaagataacaaatgttcttgggtaatcaacaaggcattggaacttgcttccgcagaacaaagaaagactttagacgaaaattacggtaagaaggactcagtcgcagaagccaaatgcaaaaagattttcaatgacttgaaaattgaacagctataccacgaatatgaagagtctattgccaaggatttgaaggccaaaatttctcaggtcgatgagtctcgtggcttcaaagctgatgtcttaactgcgttcttgaacaaagtttacaagagaagcaaaggttctggatcagccgggagcgaccagatagaaggaagtcctcatcacgagtctgataactccattgcgacaaaaatcctgaatttcggtcatacgtgctggaagttacaaaggccctatgtcgtgaaaggtcttatttcgatagcttgtggcttgtttggtcgcgaactatttcataataccaaccttttatcttggtcattgatgctcaaggcattctcatccttaatggtaatcctttcttttaatttctttgctgccgcaatgaatcaaatttacgatgttgatattgaccgaattaacaaaccagatttgccactcgttagtggagagatgagtatcgaaactgcatggatactatcgatcattgtcgctctgacaggcttaatattgactattaagcttaattgtggtccgctatttatatcattgtattgcgtatctattttcgctggatttgcatacagcgttcctccaattcgttggaaaagatatcctttcaccaacttcttaataactatcagctcacacgtgggtgttaactttacatgttattacgcctccagagcagcctttggcttacccttcgaaatgtctccgccatttacttttattctcgcttttatgaccgtaatgggaatgacaatagctttcgcgaaagacatttcagatatcgaaggtgatgcgaaatatggggtgtctactgttgctacgaagttaggtgcaagaaatatgacgtttgttgtcagtggtgtcttgttgctgacatacgtaagcgctatacttgcagctatcatttggccgcaagcctttaagtcaaatgtgatgttgttatctcatgccatcctggcgttctgcctaattttccaaactagagagctagcgcttgcaaattatgcttctgcacctagtaggcagttttttgaatttatctggaaattgcattatgcagagtacttagtttatgttttcatc

SEQ ID NO: 329 - DNA, 2031 bp, Artificial Sequence
  Synthetic
atggcttcagaaaaagaaattaggagagagagattcttgaacgttttccctaaattagtagaggaattgaacgcatcgcttttggcttacggtatgcctaaggaagcatgtgactggtatgcccactcattgaactacaacactccaggcggtaagctaaatagaggtttgtccgttgtggacacgtatgctattctctccaacaagaccgttgaacaattggggcaagaagaatacgaaaaggttgccattctaggttggtgcattgagttgttgcaggcttactggttggtcgccgatgatatgatggacaagtccattaccagaagaggccaaccatgttggtacaaggttcctgaagttggggaaattgccatctgggacgcattcatgttagaggctgctatctacaagcttttgaaatctcacttcagaaacgaaaaatactacatagatatcaccgaattgttccatgaggtcaccttccaaaccgaattgggccaattgatggacttaatcactgcacctgaagacaaagtcgacttgagtaagttctccctaaagaagcactccttcatagttactttcaagactgcttactattctttctacttgcctgtcgcattggccatgtacgttgccggtatcacggatgaaaaggatttgaaacaagccagagatgtcttgattccattgggtgaatacttccaaattcaagatgactacttagactgcttcggtaccccagaacagatcggtaagatcggtacagatatccaagataacaaatgttcttgggtaatcaacaaggcattggaacttgcttccgcagaacaaagaaagactttagacgaaaattacggtaagaaggactcagtcgcagaagccaaatgcaaaaagattttcaatgacttgaaaattgaacagctataccacgaatatgaagagtctattgccaaggatttgaaggccaaaatttctcaggtcgatgagtctcgtggcttcaaagctgatgtcttaactgcgttcttgaacaaagtttacaagagaagcaaaggttctggatccgcaggatcagatcaaatagaagggagcccccatcacgagtcggacaacagtatcgcgacaaaaattcttaattttggccatactttctggaagttacagcgtccttacgtagttaaaggtctaatttctatcgcttgcggtttgttcggtaaggaactactccacaatacgaacttgatatcatggtctttaatgtttaaagccttctttgctctggtcccaattctaagtttcaattttttcgcagccgctgttaatcaaatctatgatgttgagatagataggattaacaagccggatttaccactcgtgtccggagaaatgtctatagagacagcttggatcctgtcgattattgtcgctcttactggcttgatagttaccattaaaatgaaaggtggccctttatttgtgtttatctatatatttggtcttttcgcaggttttgcttactctgtacctccaattcgatggaagcagtatccgttcactaactttttgatcaccatttcaagccatgttggactagccttcacatcctactatgcttctagagccgcgcttggtctaccatttgaactgcgcccctcatttagttttataattgcattcatgacagttatggggatgactattgcctttgcaaaggacatttcagatattgaaggagatgcaaaatatggtgtcagaacggtagctactaaattaggtgctagaaatatgaccttcgttgtgtcgggggtgttgctattaaattacttagtcagtattttggcaggaataatctggccccaagcttttaattcaaatgtcatgatcttatcgcacgcaattttggccttctgtctcatctttaggacgagagaattagcccttgctaactacgcaagtgctccttcccgtcaatttttcgagtttatttggcgcctgtattatgcggaatacctggtatacgttttcatt

SEQ ID NO: 330 - DNA, 2031 bp, Artificial Sequence
  Synthetic
atggcttcagaaaaagaaattaggagagagagattcttgaacgttttccctaaattagtagaggaattgaacgcatcgcttttggcttacggtatgcctaaggaagcatgtgactggtatgcccactcattgaactacaacactccaggcggtaagctaaatagaggtttgtccgttgtggacacgtatgctattctctccaacaagaccgttgaacaattggggcaagaagaatacgaaaaggttgccattctaggttggtgcattgagttgttgcaggcttactggttggtcgccgatgatatgatggacaagtccattaccagaagaggccaaccatgttggtacaaggttcctgaagttggggaaattgccatctgggacgcattcatgttagaggctgctatctacaagcttttgaaatctcacttcagaaacgaaaaatactacatagatatcaccgaattgttccatgaggtcaccttccaaaccgaattgggccaattgatggacttaatcactgcacctgaagacaaagtcgacttgagtaagttctccctaaagaagcactccttcatagttactttcaagactgcttactattctttctacttgcctgtcgcattggccatgtacgttgccggtatcacggatgaaaaggatttgaaacaagccagagatgtcttgattccattgggtgaatacttccaaattcaagatgactacttagactgcttcggtaccccagaacagatcggtaagatcggtacagatatccaagataacaaatgttcttgggtaatcaacaaggcattggaacttgcttccgcagaacaaagaaagactttagacgaaaattacggtaagaaggactcagtcgcagaagccaaatgcaaaaagattttcaatgacttgaaaattgaacagctataccacgaatatgaagagtctattgccaaggatttgaaggccaaaatttctcaggtcgatgagtctcgtggcttcaaagctgatgtcttaactgcgttcttgaacaaagtttacaagagaagcaaaggttctggatcagccgggagcgaccagatagaaggaagtcctcatcacgagtctgataactccattgcgacaaaaatcctgaatttcggtcatacgtgctggaagttacaaaggccctatgtcgtgaaaggtatgatttcgatagcttgtggcttgtttggtcgcgaactatttcataataccaaccttttatcttggtcattgatgctcaaggcattctcatccttaatggtaatcctttcttttaatttctttgctgccagtatgaatcaaatttacgatgttgatattgaccgaattaacaaaccagatttgccactcgttagtggagagatgagtatcgaaactgcatggatactatcgatcattgtcgctctgacaggcttaatattgactattaagcttaattgtggtccgctatttatatcattgtattgcgtatctattttcgctggatttgcatacagcgttcctccaattcgttggaaacagtatcctttcaccaacttcttaataactatcagctcacacgtgggtgttaactttacatgttattacgcctccagagcagcctttggcttacccttcgaaatgtctccgccatttacttttattctcgcttttatgaccgtaatgggaatgacaatagctttcgcgaaagacatttcagatatcgaaggtgatgcgaaatatggggtgagaactgttgctacgaagttaggtgcaagaaatatgacgtttgttgtcagtggtgtcttgttgctgacatacgtaagcgctatacttgcagctatcatttggccgcaagcctttaagtcaaatgtgatgttgttatctcatgccatcctggcgttctgcctaattttcaggactagagagctagcgcttgcaaattatgcttctgcacctagtaggcagttttttgaatttatctggaaattgcattatgcagagtacttagtttatgttttcatc

SEQ ID NO: 331 - DNA, 2031 bp, Artificial Sequence
  Synthetic
atggcttcagaaaaagaaattaggagagagagattcttgaacgttttccctaaattagtagaggaattgaacgcatcgcttttggcttacggtatgcctaaggaagcatgtgactggtatgcccactcattgaactacaacactccaggcggtaagctaaatagaggtttgtccgttgtggacacgtatgctattctctccaacaagaccgttgaacaattggggcaagaagaatacgaaaaggttgccattctaggttggtgcattgagttgttgcaggcttactggttggtcgccgatgatatgatggacaagtccattaccagaagaggccaaccatgttggtacaaggttcctgaagttggggaaattgccatctgggacgcattcatgttagaggctgctatctacaagcttttgaaatctcacttcagaaacgaaaaatactacatagatatcaccgaattgttccatgaggtcaccttccaaaccgaattgggccaattgatggacttaatcactgcacctgaagacaaagtcgacttgagtaagttctccctaaagaagcactccttcatagttactttcaagactgcttactattctttctacttgcctgtcgcattggccatgtacgttgccggtatcacggatgaaaaggatttgaaacaagccagagatgtcttgattccattgggtgaatacttccaaattcaagatgactacttagactgcttcggtaccccagaacagatcggtaagatcggtacagatatccaagataacaaatgttcttgggtaatcaacaaggcattggaacttgcttccgcagaacaaagaaagactttagacgaaaattacggtaagaaggactcagtcgcagaagccaaatgcaaaaagattttcaatgacttgaaaattgaacagctataccacgaatatgaagagtctattgccaaggatttgaaggccaaaatttctcaggtcgatgagtctcgtggcttcaaagctgatgtcttaactgcgttcttgaacaaagtttacaagagaagcaaaggttctggatcagccgggagcgaccagatagaaggaagtcctcatcacgagtctgataactccattgcgacaaaaatcctgaatttcggtcatacgtgctggaagttacaaaggccctatgtcgtgaaaggtcttatttcgatagcttgtggcttgtttggtcgcgaactatttcataataccaaccttttatcttggtcattgatgctcaaggcattctcatccttaatggtaatcctttcttttaatttctttgctgccgcaatgaatcaaatttacgatgttgatattgaccgaattaacaaaccagatttgccactcgttagtggagagatgagtatcgaaactgcatggatactatcgatcattgtcgctctgacaggcttaatattgactattaagcttaattgtggtccgctatttatatcattgtattgcgtatctattttcgctggatttgcatacagcgttcctccaattcgttggaaacagtatcctttcaccaacttcttaataactatcagctcacacgtgggtgttaactttacatgttattacgcctccagagcagcctttggcttacccttcgaaatgtctccgccatttacttttattctcgcttttatgaccgtaatgggaatgacaatagctttcgcgaaagacatttcagatatcgaaggtgatgcgaaatatggggtgtctactgttgctacgaagttaggtgcaagaaatatgacgtttgttgtcagtggtgtcttgttgctgacatacgtaagcgctatacttgcagctatcatttggccgcaagcctttaagtcaaatgtgatgttgttatctcatgccatcctggcgttctgcctaattttcagaactagagagctagcgcttgcaaattatgcttctgcacctagtaggcagttttttgaatttatctggaaattgcattatgcagagtacttagtttatgttttcatc

SEQ ID NO: 332 - DNA, 2028 bp, Artificial Sequence
  Synthetic
atggcttcagaaaaagaaattaggagagagagattcttgaacgttttccctaaattagtagaggaattgaacgcatcgcttttggcttacggtatgcctaaggaagcatgtgactggtatgcccactcattgaactacaacactccaggcggtaagctaaatagaggtttgtccgttgtggacacgtatgctattctctccaacaagaccgttgaacaattggggcaagaagaatacgaaaaggttgccattctaggttggtgcattgagttgttgcaggcttactggttggtcgccgatgatatgatggacaagtccattaccagaagaggccaaccatgttggtacaaggttcctgaagttggggaaattgccatctgggacgcattcatgttagaggctgctatctacaagcttttgaaatctcacttcagaaacgaaaaatactacatagatatcaccgaattgttccatgaggtcaccttccaaaccgaattgggccaattgatggacttaatcactgcacctgaagacaaagtcgacttgagtaagttctccctaaagaagcactccttcatagttactttcaagactgcttactattctttctacttgcctgtcgcattggccatgtacgttgccggtatcacggatgaaaaggatttgaaacaagccagagatgtcttgattccattgggtgaatacttccaaattcaagatgactacttagactgcttcggtaccccagaacagatcggtaagatcggtacagatatccaagataacaaatgttcttgggtaatcaacaaggcattggaacttgcttccgcagaacaaagaaagactttagacgaaaattacggtaagaaggactcagtcgcagaagccaaatgcaaaaagattttcaatgacttgaaaattgaacagctataccacgaatatgaagagtctattgccaaggatttgaaggccaaaatttctcaggtcgatgagtctcgtggcttcaaagctgatgtcttaactgcgttcttgaacaaagtttacaagagaagcaaaggttctggaagcgcaggttcagatcaaatagagggatccccacatcacgaaagtgacaactcgatcgccactaagattcttaattttgggcatacctgttggaaactacagcgcccgtacgtggtaaaaggtatgatttctatagcgtgcggcttattcggtcgtgaactgtttcataatacgaacttgttatcttggtcattgatgctaaaggctttcagttccctcatggttattttgagctttaactttttcgcagctatcatgaatcaaatatatgatgttgatatcgacaggattaataaacctgatttacccttggtcagtggcgaaatgtctattgagactgcctggattttatcaattatagtagctctcacaggacttattttaacaatcaagctaaactgtgggccactgtttatttcattgtattgcgtgtctatatttgccggattcgcgtacagcgtcccacctatacgatggaaacaatatccattcacaaattttctgatcactatttcctcgcacgttggtgttaatttcacctgttattacgctagcagagcagcttttggtttgcctttcgaaatgtctccgccctttacattcatcttagcatttatgacggtaatgggcatgactattgcgtttgctaaagacatctcggatatagagggtgacgccaagtacggagtctcgactgtggcaaccaagctaggtgcaagaaacatgacctttgttgtttcgggtgttttactgctgaattatctggtgtctatttcaataggtataatttggcctttcctttggtcaaaagtggtaaccgtcttgggccatactatcttggctagtatactatggacaaacgcaaaaagtgttgatctttcctccaaggctgccataactagtttctatatgtttatttggaaattattttacgctgaatatttgctgatcccgttagttaga

SEQ ID NO: 333 - DNA, 2031 bp, Artificial Sequence
  Synthetic
atggcttcagaaaaagaaattaggagagagagattcttgaacgttttccctaaattagtagaggaattgaacgcatcgcttttggcttacggtatgcctaaggaagcatgtgactggtatgcccactcattgaactacaacactccaggcggtaagctaaatagaggtttgtccgttgtggacacgtatgctattctctccaacaagaccgttgaacaattggggcaagaagaatacgaaaaggttgccattctaggttggtgcattgagttgttgcaggcttactggttggtcgccgatgatatgatggacaagtccattaccagaagaggccaaccatgttggtacaaggttcctgaagttggggaaattgccatctgggacgcattcatgttagaggctgctatctacaagcttttgaaatctcacttcagaaacgaaaaatactacatagatatcaccgaattgttccatgaggtcaccttccaaaccgaattgggccaattgatggacttaatcactgcacctgaagacaaagtcgacttgagtaagttctccctaaagaagcactccttcatagttactttcaagactgcttactattctttctacttgcctgtcgcattggccatgtacgttgccggtatcacggatgaaaaggatttgaaacaagccagagatgtcttgattccattgggtgaatacttccaaattcaagatgactacttagactgcttcggtaccccagaacagatcggtaagatcggtacagatatccaagataacaaatgttcttgggtaatcaacaaggcattggaacttgcttccgcagaacaaagaaagactttagacgaaaattacggtaagaaggactcagtcgcagaagccaaatgcaaaaagattttcaatgacttgaaaattgaacagctataccacgaatatgaagagtctattgccaaggatttgaaggccaaaatttctcaggtcgatgagtctcgtggcttcaaagctgatgtcttaactgcgttcttgaacaaagtttacaagagaagcaaaggttctggatccgcaggatcagatcaaatagaagggagcccccatcacgagtcggacaacagtatcgcgacaaaaattcttaattttggccatactttctggaagttacagcgtccttacgtagttaaaggtctgatttctatcgcttgcggtttgttcggtaaggaactactccacaatacgaacttgatatcatggtctttaatgtttaaagccttctttgctctggtcccaattctaagtttcaattttttcgcagccgctatgaatcaaatctatgatgttgaaatagataggattaacaagccggatttaccactcgtgtccggagaaatgtctatagagacagcttggatcctgtcgattattgtcgctcttactggcttgatagttaccattaaaatgaaaggtggccctttatttgtgtttatctatatatttggtttgttcgcaggttttgcttactctgtacctccaattcgatggaagcagtatccgttcactaactttttgatcaccatttcaagccatgttggactagccttcacatcctactatgcttctagagccgcgcttggtctaccatttgaactgcgcccctcatttagttttataattgcattcatgacagttatggggatgactattgcctttgcaaaggacatttcagatattgaaggagatgcaaaatatggtgtcagaacggtagctactaaattaggtgctagaaatatgacccgagttgtgtcgggggtgttgctattaaattacttagtcagtattttggcaggaataatctggccccaagcttttaattcaaatgtcatgatcttatcgcacgcaattttggccttctgtctcatctttagaacgagagaattagcccttgctaactacgcaagtgctccttcccgtcaatttttcgagtttatttggagactgtattatgcggaatacctggtatacgttttcatt

SEQ ID NO: 334 - DNA, 2031 bp, Artificial Sequence
  Synthetic
atggcttcagaaaaagaaattaggagagagagattcttgaacgttttccctaaattagtagaggaattgaacgcatcgcttttggcttacggtatgcctaaggaagcatgtgactggtatgcccactcattgaactacaacactccaggcggtaagctaaatagaggtttgtccgttgtggacacgtatgctattctctccaacaagaccgttgaacaattggggcaagaagaatacgaaaaggttgccattctaggttggtgcattgagttgttgcaggcttactggttggtcgccgatgatatgatggacaagtccattaccagaagaggccaaccatgttggtacaaggttcctgaagttggggaaattgccatctgggacgcattcatgttagaggctgctatctacaagcttttgaaatctcacttcagaaacgaaaaatactacatagatatcaccgaattgttccatgaggtcaccttccaaaccgaattgggccaattgatggacttaatcactgcacctgaagacaaagtcgacttgagtaagttctccctaaagaagcactccttcatagttactttcaagactgcttactattctttctacttgcctgtcgcattggccatgtacgttgccggtatcacggatgaaaaggatttgaaacaagccagagatgtcttgattccattgggtgaatacttccaaattcaagatgactacttagactgcttcggtaccccagaacagatcggtaagatcggtacagatatccaagataacaaatgttcttgggtaatcaacaaggcattggaacttgcttccgcagaacaaagaaagactttagacgaaaattacggtaagaaggactcagtcgcagaagccaaatgcaaaaagattttcaatgacttgaaaattgaacagctataccacgaatatgaagagtctattgccaaggatttgaaggccaaaatttctcaggtcgatgagtctcgtggcttcaaagctgatgtcttaactgcgttcttgaacaaagtttacaagagaagcaaaggttctggatcagccgggagcgaccagatagaaggaagtcctcatcacgagtctgataactccattgcgacaaaaatcctgaatttcggtcatacgtgctggaagttacaaaggccctatgtcgtgaaaggtatgatttcgatagcttgtggcttgtttggtcgcgaactatttcataataccaaccttttatcttggtcattgatgctcaaggcattctcatccttaatggtaatcctttcttttaatttctttgctgccagtatgaatcaaatttacgatgttgatattgaccgaattaacaaaccagatttgccactcgttagtggagagatgagtatcgaaactgcatggatactatcgatcattgtcgctctgacaggcttaatattgactattaagcttaattgtggtccgctatttatatcattgtattgcgtatctattttcgctggatttgcatacagcgttcctccaattcgttggaaaaggtatcctttcaccaacttcttaataactatcagctcacacgtgggtgttaactttacatgttattacgcctccagagcagcctttggcttacccttcgaaatgtctccgccatttacttttattctcgcttttatgaccgtaatgggaatgacaatagctttcgcgaaagacatttcagatatcgaaggtgatgcgaaatatggggtgtctactgttgctacgaagttaggtgcaagaaatatgacgtttgttgtcagtggtgtcttgttgctgacatacgtaagcgctatacttgcagctatcatttggccgcaagcctttaagtcaaatgtgatgttgttatctcatgccatcctggcgttctgcctaattttccgtactagagagctagcgcttgcaaattatgcttctgcacctagtaggcagttttttgaatttatctggaaattgcattatgcagagtacttagtttatgttttcatc

SEQ ID NO: 335 - DNA, 2031 bp, Artificial Sequence
  Synthetic
atggcttcagaaaaagaaattaggagagagagattcttgaacgttttccctaaattagtagaggaattgaacgcatcgcttttggcttacggtatgcctaaggaagcatgtgactggtatgcccactcattgaactacaacactccaggcggtaagctaaatagaggtttgtccgttgtggacacgtatgctattctctccaacaagaccgttgaacaattggggcaagaagaatacgaaaaggttgccattctaggttggtgcattgagttgttgcaggcttactggttggtcgccgatgatatgatggacaagtccattaccagaagaggccaaccatgttggtacaaggttcctgaagttggggaaattgccatctgggacgcattcatgttagaggctgctatctacaagcttttgaaatctcacttcagaaacgaaaaatactacatagatatcaccgaattgttccatgaggtcaccttccaaaccgaattgggccaattgatggacttaatcactgcacctgaagacaaagtcgacttgagtaagttctccctaaagaagcactccttcatagttactttcaagactgcttactattctttctacttgcctgtcgcattggccatgtacgttgccggtatcacggatgaaaaggatttgaaacaagccagagatgtcttgattccattgggtgaatacttccaaattcaagatgactacttagactgcttcggtaccccagaacagatcggtaagatcggtacagatatccaagataacaaatgttcttgggtaatcaacaaggcattggaacttgcttccgcagaacaaagaaagactttagacgaaaattacggtaagaaggactcagtcgcagaagccaaatgcaaaaagattttcaatgacttgaaaattgaacagctataccacgaatatgaagagtctattgccaaggatttgaaggccaaaatttctcaggtcgatgagtctcgtggcttcaaagctgatgtcttaactgcgttcttgaacaaagtttacaagagaagcaaaggttctggatcagccgggagcgaccagatagaaggaagtcctcatcacgagtctgataactccattgcgacaaaaatcctgaatttcggtcatacgtgctggaagttacaaaggccctatgtcgtgaaaggtatgatttcgatagcttgtggcttgtttggtcgcgaactatttcataataccaaccttttatcttggtcattgatgctcaaggcattctcatccttaatggtaatcctttcttttaatttctttgctgccataatgaatcaaatttacgatgttgatattgaccgaattaacaaaccagatttgccactcgttagtggagagatgagtatcgaaactgcatggatactatcgatcattgtcgctctgacaggcttaatattgactattaagcttaattgtggtccgctatttatatcattgtattgcgtatctcttttcgctggatttgcatacagcgttcctccaattcgttggaaacagtatcctttcaccaacttcttaataactatcagctcacacgtgggtgttaactttacatgttattacgcctccagagcagcctttggcttacccttcgaaatgtctccgccatttacttttattctcgcttttatgaccgtaatgggaatgacaatagctttcgcgaaagacatttcagatatcgaaggtgatgcgaaatatggggtgagaactgttgctacgaagttaggtgcaagaaatatgacgtttgttgtcagtggtgtcttgttgctgacatacgtaagcgctatacttgcagctatcatttggccgcaagcctttaagtcaaatgtgatgttgttatctcatgccatcctggcgttctgcctaattttccaaactagagagctagcgcttgcaaattatgcttctgcacctagtaggcagttttttgaatttatctggaaattgcattatgcagagtacttagtttatgttttcatc

SEQ ID NO: 336 - DNA, 2028 bp, Artificial Sequence
  Synthetic
atggcttcagaaaaagaaattaggagagagagattcttgaacgttttccctaaattagtagaggaattgaacgcatcgcttttggcttacggtatgcctaaggaagcatgtgactggtatgcccactcattgaactacaacactccaggcggtaagctaaatagaggtttgtccgttgtggacacgtatgctattctctccaacaagaccgttgaacaattggggcaagaagaatacgaaaaggttgccattctaggttggtgcattgagttgttgcaggcttactggttggtcgccgatgatatgatggacaagtccattaccagaagaggccaaccatgttggtacaaggttcctgaagttggggaaattgccatctgggacgcattcatgttagaggctgctatctacaagcttttgaaatctcacttcagaaacgaaaaatactacatagatatcaccgaattgttccatgaggtcaccttccaaaccgaattgggccaattgatggacttaatcactgcacctgaagacaaagtcgacttgagtaagttctccctaaagaagcactccttcatagttactttcaagactgcttactattctttctacttgcctgtcgcattggccatgtacgttgccggtatcacggatgaaaaggatttgaaacaagccagagatgtcttgattccattgggtgaatacttccaaattcaagatgactacttagactgcttcggtaccccagaacagatcggtaagatcggtacagatatccaagataacaaatgttcttgggtaatcaacaaggcattggaacttgcttccgcagaacaaagaaagactttagacgaaaattacggtaagaaggactcagtcgcagaagccaaatgcaaaaagattttcaatgacttgaaaattgaacagctataccacgaatatgaagagtctattgccaaggatttgaaggccaaaatttctcaggtcgatgagtctcgtggcttcaaagctgatgtcttaactgcgttcttgaacaaagtttacaagagaagcaaaggttctggatccgccggtagcgatcagattgagggaagtcctcaccatgaatctgacaactcgatagctactaaaatcttgaatttcgggcatacatgctggaagcttcaacgaccctacgttgtcaaaggcatgatttcaatagcatgtggtctatttggcagggaactgtttcataataccaacttactctcttggtccttgatgttaaaggctttctcatcattgatggtaatcttatcctttaatttctttgcagcgattatgaaccaaatatatgatgtggacattgatcgcattaataaaccggatctcccactagttagtggggaaatgtctatagaaacggcatggatcctaagtattatcgtcgccctaactggtctgatcttgacaattaagttgaattgtggaccattattcatttctttatattgcgtttcgatatttgctggttttgcgtactctgtgcctccaatacgttggaaacagtatccgttcactaactttcttattaccatcagctctcacgttggtgtaaactttacttgttactatgcatcacgggctgccttcggtttgccttttgagatgagccctcccttcacattcattctggcttttatgacggtaatgggaatgactattgccttcgcaaaggatatatcggacatcgaaggcgatgctaaatacggtgtttcgacagttgcaaccaaactaggagctagaaatatgacatttgtcgtgagtggggttttacttttgaattatttggtcagtatttcaataggtattatctggccacaagtattcaagtccaacatcatgatattatcccacactatattagcatcgattttatggaccaatgcgaaatctgtagacctgtcctcaaaagctgccattacatctttttatatgttcatttggaaattgttttacgcggagtatcttcttatcccactggttaga

SEQ ID NO: 337 - DNA, 2031 bp, Artificial Sequence
  Synthetic
atggcttcagaaaaagaaattaggagagagagattcttgaacgttttccctaaattagtagaggaattgaacgcatcgcttttggcttacggtatgcctaaggaagcatgtgactggtatgcccactcattgaactacaacactccaggcggtaagctaaatagaggtttgtccgttgtggacacgtatgctattctctccaacaagaccgttgaacaattggggcaagaagaatacgaaaaggttgccattctaggttggtgcattgagttgttgcaggcttactggttggtcgccgatgatatgatggacaagtccattaccagaagaggccaaccatgttggtacaaggttcctgaagttggggaaattgccatctgggacgcattcatgttagaggctgctatctacaagcttttgaaatctcacttcagaaacgaaaaatactacatagatatcaccgaattgttccatgaggtcaccttccaaaccgaattgggccaattgatggacttaatcactgcacctgaagacaaagtcgacttgagtaagttctccctaaagaagcactccttcatagttactttcaagactgcttactattctttctacttgcctgtcgcattggccatgtacgttgccggtatcacggatgaaaaggatttgaaacaagccagagatgtcttgattccattgggtgaatacttccaaattcaagatgactacttagactgcttcggtaccccagaacagatcggtaagatcggtacagatatccaagataacaaatgttcttgggtaatcaacaaggcattggaacttgcttccgcagaacaaagaaagactttagacgaaaattacggtaagaaggactcagtcgcagaagccaaatgcaaaaagattttcaatgacttgaaaattgaacagctataccacgaatatgaagagtctattgccaaggatttgaaggccaaaatttctcaggtcgatgagtctcgtggcttcaaagctgatgtcttaactgcgttcttgaacaaagtttacaagagaagcaaaggttctggatcagccgggagcgaccagatagaaggaagtcctcatcacgagtctgataactccattgcgacaaaaatcctgaatttcggtcatacgtgctggaagttacaaaggccctatgtcgtgaaaggtttgatttcgatagcttgtggcttgtttggtcgcgaactatttcataataccaaccttttatcttggtcattgatgctcaaggcattctcatccttaatggtaatcctttcttttaatttctttgctgccataatgaatcaaatttacgatgttgatattgaccgaattaacaaaccagatttgccactcgttagtggagagatgagtatcgaaactgcatggatactatcgatcattgtcgctctgacaggcttaatattgactattaagcttaattgtggtccgctatttatatcattgtattgcgtatctttgttcgctggatttgcatacagcgttcctccaattcgttggaaacagtatcctttcaccaacttcttaataactatcagctcacacgtgggtgttaactttacatgttattacgcctccagagcagcctttggcttacccttcgaaatgtctccgccatttacttttattctcgcttttatgaccgtaatgggaatgacaatagctttcgcgaaagacatttcagatatcgaaggtgatgcgaaatatggggtgaggactgttgctacgaagttaggtgcaagaaatatgacgtttgttgtcagtggtgtcttgttgctgacatacgtaagcgctatacttgcagctatcatttggccgcaagcctttaagtcaaatgtgatgttgttatctcatgccatcctggcgttctgcctaattttccaaactagagagctagcgcttgcaaattatgcttctgcacctagtaggcagttttttgaatttatctggaaattgcattatgcagagtacttagtttatgttttcatc

SEQ ID NO: 338 - DNA, 2031 bp, Artificial Sequence
  Synthetic
atggcttcagaaaaagaaattaggagagagagattcttgaacgttttccctaaattagtagaggaattgaacgcatcgcttttggcttacggtatgcctaaggaagcatgtgactggtatgcccactcattgaactacaacactccaggcggtaagctaaatagaggtttgtccgttgtggacacgtatgctattctctccaacaagaccgttgaacaattggggcaagaagaatacgaaaaggttgccattctaggttggtgcattgagttgttgcaggcttactggttggtcgccgatgatatgatggacaagtccattaccagaagaggccaaccatgttggtacaaggttcctgaagttggggaaattgccatctgggacgcattcatgttagaggctgctatctacaagcttttgaaatctcacttcagaaacgaaaaatactacatagatatcaccgaattgttccatgaggtcaccttccaaaccgaattgggccaattgatggacttaatcactgcacctgaagacaaagtcgacttgagtaagttctccctaaagaagcactccttcatagttactttcaagactgcttactattctttctacttgcctgtcgcattggccatgtacgttgccggtatcacggatgaaaaggatttgaaacaagccagagatgtcttgattccattgggtgaatacttccaaattcaagatgactacttagactgcttcggtaccccagaacagatcggtaagatcggtacagatatccaagataacaaatgttcttgggtaatcaacaaggcattggaacttgcttccgcagaacaaagaaagactttagacgaaaattacggtaagaaggactcagtcgcagaagccaaatgcaaaaagattttcaatgacttgaaaattgaacagctataccacgaatatgaagagtctattgccaaggatttgaaggccaaaatttctcaggtcgatgagtctcgtggcttcaaagctgatgtcttaactgcgttcttgaacaaagtttacaagagaagcaaaggttctggatccgcaggatcagatcaaatagaagggagcccccatcacgagtcggacaacagtatcgcgacaaaaattcttaattttggccatactttctggaagttacagcgtccttacgtagttaaaggtctgatttctatcgcttgcggtttgttcggtaaggaactactccacaatacgaacttgatatcatggtctttaatgtttaaagccttctttgctctggtcccaattctaagtttcaattttttcgcagccgctgtgaatcaaatctatgatgttgacatagataggattaacaagccggatttaccactcgtgtccggagaaatgtctatagagacagcttggatcctgtcgattattgtcgctcttactggcttgatagttaccattaaaatgaaaggtggccctttatttgtgtttatctatatatttggtttgttcgcaggttttgcttactctgtacctccaattcgatggaagcagtatccgttcactaactttttgatcaccatttcaagccatgttggactagccttcacatcctactatgcttctagagccgcgcttggtctaccatttgaactgcgcccctcatttagttttataattgcattcatgacagttatggggatgactattgcctttgcaaaggacatttcagatattgaaggagatgcaaaatatggtgtcagaacggtagctactaaattaggtgctagaaatatgaccagggttgtgtcgggggtgttgctattaaattacttagtcagtattttggcaggaataatctggccccaagcttttaattcaaatgtcatgatcttatcgcacgcaattttggccttctgtctcatctttagaacgagagaattagcccttgctaactacgcaagtgctccttcccgtcaatttttcgagtttatttggagactgtattatgcggaatacctggtatacgttttcatt

SEQ ID NO: 339 - DNA, 2031 bp, Artificial Sequence
  Synthetic
atggcttcagaaaaagaaattaggagagagagattcttgaacgttttccctaaattagtagaggaattgaacgcatcgcttttggcttacggtatgcctaaggaagcatgtgactggtatgcccactcattgaactacaacactccaggcggtaagctaaatagaggtttgtccgttgtggacacgtatgctattctctccaacaagaccgttgaacaattggggcaagaagaatacgaaaaggttgccattctaggttggtgcattgagttgttgcaggcttactggttggtcgccgatgatatgatggacaagtccattaccagaagaggccaaccatgttggtacaaggttcctgaagttggggaaattgccatctgggacgcattcatgttagaggctgctatctacaagcttttgaaatctcacttcagaaacgaaaaatactacatagatatcaccgaattgttccatgaggtcaccttccaaaccgaattgggccaattgatggacttaatcactgcacctgaagacaaagtcgacttgagtaagttctccctaaagaagcactccttcatagttactttcaagactgcttactattctttctacttgcctgtcgcattggccatgtacgttgccggtatcacggatgaaaaggatttgaaacaagccagagatgtcttgattccattgggtgaatacttccaaattcaagatgactacttagactgcttcggtaccccagaacagatcggtaagatcggtacagatatccaagataacaaatgttcttgggtaatcaacaaggcattggaacttgcttccgcagaacaaagaaagactttagacgaaaattacggtaagaaggactcagtcgcagaagccaaatgcaaaaagattttcaatgacttgaaaattgaacagctataccacgaatatgaagagtctattgccaaggatttgaaggccaaaatttctcaggtcgatgagtctcgtggcttcaaagctgatgtcttaactgcgttcttgaacaaagtttacaagagaagcaaaggttctggatccgcaggatcagatcaaatagaagggagcccccatcacgagtcggacaacagtatcgcgacaaaaattcttaattttggccatactttctggaagttacagcgtccttacgtagttaaaggtatgatttctatcgcttgcggtttgttcggtaaggaactactccacaatacgaacttgatatcatggtctttaatgtttaaagccttctttgctctggtcccaattctaagtttcaattttttcgcagcctccgtgaatcaaatctatgatgttgaaatagataggattaacaagccggatttaccactcgtgtccggagaaatgtctatagagacagcttggatcctgtcgattattgtcgctcttactggcttgatagttaccattaaaatgaaaggtggccctttatttgtgtttatctatatatttggtttgttcgcaggttttgcttactctgtacctccaattcgatggaagcagtatccgttcactaactttttgatcaccatttcaagccatgttggactagccttcacatcctactatgcttctagagccgcgcttggtctaccatttgaactgcgcccctcatttagttttataattgcattcatgacagttatggggatgactattgcctttgcaaaggacatttcagatattgaaggagatgcaaaatatggtgtcagaacggtagctactaaattaggtgctagaaatatgaccagagttgtgtcgggggtgttgctattaaattacttagtcagtattttggcaggaataatctggccccaagcttttaattcaaatgtcatgatcttatcgcacgcaattttggccttctgtctcatctttaggacgagagaattagcccttgctaactacgcaagtgctccttcccgtcaatttttcgagtttatttggaacctgtattatgcggaatacctggtatacgttttcatt

SEQ ID NO: 340 - DNA, 2031 bp, Artificial Sequence
  Synthetic
atggcttcagaaaaagaaattaggagagagagattcttgaacgttttccctaaattagtagaggaattgaacgcatcgcttttggcttacggtatgcctaaggaagcatgtgactggtatgcccactcattgaactacaacactccaggcggtaagctaaatagaggtttgtccgttgtggacacgtatgctattctctccaacaagaccgttgaacaattggggcaagaagaatacgaaaaggttgccattctaggttggtgcattgagttgttgcaggcttactggttggtcgccgatgatatgatggacaagtccattaccagaagaggccaaccatgttggtacaaggttcctgaagttggggaaattgccatctgggacgcattcatgttagaggctgctatctacaagcttttgaaatctcacttcagaaacgaaaaatactacatagatatcaccgaattgttccatgaggtcaccttccaaaccgaattgggccaattgatggacttaatcactgcacctgaagacaaagtcgacttgagtaagttctccctaaagaagcactccttcatagttactttcaagactgcttactattctttctacttgcctgtcgcattggccatgtacgttgccggtatcacggatgaaaaggatttgaaacaagccagagatgtcttgattccattgggtgaatacttccaaattcaagatgactacttagactgcttcggtaccccagaacagatcggtaagatcggtacagatatccaagataacaaatgttcttgggtaatcaacaaggcattggaacttgcttccgcagaacaaagaaagactttagacgaaaattacggtaagaaggactcagtcgcagaagccaaatgcaaaaagattttcaatgacttgaaaattgaacagctataccacgaatatgaagagtctattgccaaggatttgaaggccaaaatttctcaggtcgatgagtctcgtggcttcaaagctgatgtcttaactgcgttcttgaacaaagtttacaagagaagcaaaggttctggatcagccgggagcgaccagatagaaggaagtcctcatcacgagtctgataactccattgcgacaaaaatcctgaatttcggtcatacgtgctggaagttacaaaggccctatgtcgtgaaaggtttgatttcgatagcttgtggcttgtttggtcgcgaactatttcataataccaaccttttatcttggtcattgatgctcaaggcattctcatccttaatggtaatcctttcttttaatttctttgctgccataatgaatcaaatttacgatgttgatattgaccgaattaacaaaccagatttgccactcgttagtggagagatgagtatcgaaactgcatggatactatcgatcattgtcgctctgacaggcttaatattgactattaagcttaattgtggtccgctatttatatcattgtattgcgtatctctcttcgctggatttgcatacagcgttcctccaattcgttggaaaagatatcctttcaccaacttcttaataactatcagctcacacgtgggtgttaactttacatgttattacgcctccagagcagcctttggcttacccttcgaaatgtctccgccatttacttttattctcgcttttatgaccgtaatgggaatgacaatagctttcgcgaaagacatttcagatatcgaaggtgatgcgaaatatggggtgtctactgttgctacgaagttaggtgcaagaaatatgacgtttgttgtcagtggtgtcttgttgctgacatacgtaagcgctatacttgcagctatcatttggccgcaagcctttaagtcaaatgtgatgttgttatctcatgccatcctggcgttctgcctaattttccaaactagagagctagcgcttgcaaattatgcttctgcacctagtaggcagttttttgaatttatctggaaattgcattatgcagagtacttagtttatgttttcatc

SEQ ID NO: 341 - DNA, 2031 bp, Artificial Sequence
  Synthetic
atggcttcagaaaaagaaattaggagagagagattcttgaacgttttccctaaattagtagaggaattgaacgcatcgcttttggcttacggtatgcctaaggaagcatgtgactggtatgcccactcattgaactacaacactccaggcggtaagctaaatagaggtttgtccgttgtggacacgtatgctattctctccaacaagaccgttgaacaattggggcaagaagaatacgaaaaggttgccattctaggttggtgcattgagttgttgcaggcttactggttggtcgccgatgatatgatggacaagtccattaccagaagaggccaaccatgttggtacaaggttcctgaagttggggaaattgccatctgggacgcattcatgttagaggctgctatctacaagcttttgaaatctcacttcagaaacgaaaaatactacatagatatcaccgaattgttccatgaggtcaccttccaaaccgaattgggccaattgatggacttaatcactgcacctgaagacaaagtcgacttgagtaagttctccctaaagaagcactccttcatagttactttcaagactgcttactattctttctacttgcctgtcgcattggccatgtacgttgccggtatcacggatgaaaaggatttgaaacaagccagagatgtcttgattccattgggtgaatacttccaaattcaagatgactacttagactgcttcggtaccccagaacagatcggtaagatcggtacagatatccaagataacaaatgttcttgggtaatcaacaaggcattggaacttgcttccgcagaacaaagaaagactttagacgaaaattacggtaagaaggactcagtcgcagaagccaaatgcaaaaagattttcaatgacttgaaaattgaacagctataccacgaatatgaagagtctattgccaaggatttgaaggccaaaatttctcaggtcgatgagtctcgtggcttcaaagctgatgtcttaactgcgttcttgaacaaagtttacaagagaagcaaaggttctggatctgcaggaagcgatcagatagagggcagtccacaccatgaatccgacaattcgattgcgaccaaaatccttaacttcgggcatacttgctggaagctgcaacgaccgtatgtggttaaaggtatgatttcaatcgcctgtggtttgtttggcaaggaactactccataatacgaacttaatatcttggtcattaatgtttaaagctttctttgcattggtacctattttaagctttaacttctttgccgctatcatgaatcaaatttacgatgtcgacatagataggattaataagcccgatctgcctttggttagtggtgaaatgtccattgagacagcttggatactaagtatcatcgtggccctcactggacttattgtaacaattaaaatgaaagggggaccattattcgtttttatctatatttttggtatattcgcaggtttcgcttactctgttccacctattcgttggaaacaatatccatttactaattttctgatcaccatttcatctcacgtcggtttggcgttcacgtcatattacgcgtccagagcagctctaggcttaccatttgaacttcgcccttctttctcctttataattgctttcatgaccgtgatgggcatgacaattgcctttgcaaaggacatatcagatattgagggtgatgcaaaatacggagtctcaacattagctagcaagtatggttctagaaacttgactttattttgttcgggcatcgttttgctctcgtatgttgccgcgattttggcaggaataatctggccccaggcttttaattctaatgtaatgctactttcccatgcaatacttgccttctggcttattctgcaaacgagagactttgctttaactaactacgatccggaagctggtaggcgtttctacgaatttatgtggaaattgtattatgcagaatatctcgtatacgtttttata

SEQ ID NO: 342 - DNA, 2031 bp, Artificial Sequence
  Synthetic
atggcttcagaaaaagaaattaggagagagagattcttgaacgttttccctaaattagtagaggaattgaacgcatcgcttttggcttacggtatgcctaaggaagcatgtgactggtatgcccactcattgaactacaacactccaggcggtaagctaaatagaggtttgtccgttgtggacacgtatgctattctctccaacaagaccgttgaacaattggggcaagaagaatacgaaaaggttgccattctaggttggtgcattgagttgttgcaggcttactggttggtcgccgatgatatgatggacaagtccattaccagaagaggccaaccatgttggtacaaggttcctgaagttggggaaattgccatctgggacgcattcatgttagaggctgctatctacaagcttttgaaatctcacttcagaaacgaaaaatactacatagatatcaccgaattgttccatgaggtcaccttccaaaccgaattgggccaattgatggacttaatcactgcacctgaagacaaagtcgacttgagtaagttctccctaaagaagcactccttcatagttactttcaagactgcttactattctttctacttgcctgtcgcattggccatgtacgttgccggtatcacggatgaaaaggatttgaaacaagccagagatgtcttgattccattgggtgaatacttccaaattcaagatgactacttagactgcttcggtaccccagaacagatcggtaagatcggtacagatatccaagataacaaatgttcttgggtaatcaacaaggcattggaacttgcttccgcagaacaaagaaagactttagacgaaaattacggtaagaaggactcagtcgcagaagccaaatgcaaaaagattttcaatgacttgaaaattgaacagctataccacgaatatgaagagtctattgccaaggatttgaaggccaaaatttctcaggtcgatgagtctcgtggcttcaaagctgatgtcttaactgcgttcttgaacaaagtttacaagagaagcaaaggttctggatcagccgggagcgaccagatagaaggaagtcctcatcacgagtctgataactccattgcgacaaaaatcctgaatttcggtcatacgtgctggaagttacaaaggccctatgtcgtgaaaggtatgatttcgatagcttgtggcttgtttggtcgcgaactatttcataataccaaccttttatcttggtcattgatgctcaaggcattctcatccttaatggtaatcctttcttttaatttctttgctgccataatgaatcaaatttacgatgttgatattgaccgaattaacaaaccagatttgccactcgttagtggagagatgagtatcgaaactgcatggatactatcgatcattgtcgctctgacaggcttaatattgactattaagcttaattgtggtccgctatttatatcattgtattgcgtatctttattcgctggatttgcatacagcgttcctccaattcgttggaaaagatatcctttcaccaacttcttaataactatcagctcacacgtgggtgttaactttacatgttattacgcctccagagcagcctttggcttacccttcgaaatgtctccgccatttacttttattctcgcttttatgaccgtaatgggaatgacaatagctttcgcgaaagacatttcagatatcgaaggtgatgcgaaatatggggtgtctactgttgctacgaagttaggtgcaagaaatatgacgtttgttgtcagtggtgtcttgttgctgacatacgtaagcgctatacttgcagctatcatttggccgcaagcctttaagtcaaatgtgatgttgttatctcatgccatcctggcgttctgcctaattttccaaactagagagctagcgcttgcaaattatgcttctgcacctagtaggcagttttttgaatttatctggaaattgcattatgcagagtacttagtttatgttttcatc

SEQ ID NO: 343 - DNA, 2031 bp, Artificial Sequence
  Synthetic
atggcttcagaaaaagaaattaggagagagagattcttgaacgttttccctaaattagtagaggaattgaacgcatcgcttttggcttacggtatgcctaaggaagcatgtgactggtatgcccactcattgaactacaacactccaggcggtaagctaaatagaggtttgtccgttgtggacacgtatgctattctctccaacaagaccgttgaacaattggggcaagaagaatacgaaaaggttgccattctaggttggtgcattgagttgttgcaggcttactggttggtcgccgatgatatgatggacaagtccattaccagaagaggccaaccatgttggtacaaggttcctgaagttggggaaattgccatctgggacgcattcatgttagaggctgctatctacaagcttttgaaatctcacttcagaaacgaaaaatactacatagatatcaccgaattgttccatgaggtcaccttccaaaccgaattgggccaattgatggacttaatcactgcacctgaagacaaagtcgacttgagtaagttctccctaaagaagcactccttcatagttactttcaagactgcttactattctttctacttgcctgtcgcattggccatgtacgttgccggtatcacggatgaaaaggatttgaaacaagccagagatgtcttgattccattgggtgaatacttccaaattcaagatgactacttagactgcttcggtaccccagaacagatcggtaagatcggtacagatatccaagataacaaatgttcttgggtaatcaacaaggcattggaacttgcttccgcagaacaaagaaagactttagacgaaaattacggtaagaaggactcagtcgcagaagccaaatgcaaaaagattttcaatgacttgaaaattgaacagctataccacgaatatgaagagtctattgccaaggatttgaaggccaaaatttctcaggtcgatgagtctcgtggcttcaaagctgatgtcttaactgcgttcttgaacaaagtttacaagagaagcaaaggttctggatccgcaggatcagatcaaatagaagggagcccccatcacgagtcggacaacagtatcgcgacaaaaattcttaattttggccatactttctggaagttacagcgtccttacgtagttaaaggtctaatttctatcgcttgcggtttgttcggtaaggaactactccacaatacgaacttgatatcatggtctttaatgtttaaagccttctttgctctggtcccaattctaagtttcaattttttcgcagccattgtgaatcaaatctatgatgttgaaatagataggattaacaagccggatttaccactcgtgtccggagaaatgtctatagagacagcttggatcctgtcgattattgtcgctcttactggcttgatagttaccattaaaatgaaaggtggccctttatttgtgtttatctatatatttggtttgttcgcaggttttgcttactctgtacctccaattcgatggaagcagtatccgttcactaactttttgatcaccatttcaagccatgttggactagccttcacatcctactatgcttctagagccgcgcttggtctaccatttgaactgcgcccctcatttagttttataattgcattcatgacagttatggggatgactattgcctttgcaaaggacatttcagatattgaaggagatgcaaaatatggtgtcagaacggtagctactaaattaggtgctagaaatatgacccgtgttgtgtcgggggtgttgctattaaattacttagtcagtattttggcaggaataatctggccccaagcttttaattcaaatgtcatgatcttatcgcacgcaattttggccttctgtctcatctttaggacgagagaattagcccttgctaactacgcaagtgctccttcccgtcaatttttcgagtttatttggaacctgtattatgcggaatacctggtatacgttttcatt

SEQ ID NO: 344 - DNA, 2031 bp, Artificial Sequence
  Synthetic
atggcttcagaaaaagaaattaggagagagagattcttgaacgttttccctaaattagtagaggaattgaacgcatcgcttttggcttacggtatgcctaaggaagcatgtgactggtatgcccactcattgaactacaacactccaggcggtaagctaaatagaggtttgtccgttgtggacacgtatgctattctctccaacaagaccgttgaacaattggggcaagaagaatacgaaaaggttgccattctaggttggtgcattgagttgttgcaggcttactggttggtcgccgatgatatgatggacaagtccattaccagaagaggccaaccatgttggtacaaggttcctgaagttggggaaattgccatctgggacgcattcatgttagaggctgctatctacaagcttttgaaatctcacttcagaaacgaaaaatactacatagatatcaccgaattgttccatgaggtcaccttccaaaccgaattgggccaattgatggacttaatcactgcacctgaagacaaagtcgacttgagtaagttctccctaaagaagcactccttcatagttactttcaagactgcttactattctttctacttgcctgtcgcattggccatgtacgttgccggtatcacggatgaaaaggatttgaaacaagccagagatgtcttgattccattgggtgaatacttccaaattcaagatgactacttagactgcttcggtaccccagaacagatcggtaagatcggtacagatatccaagataacaaatgttcttgggtaatcaacaaggcattggaacttgcttccgcagaacaaagaaagactttagacgaaaattacggtaagaaggactcagtcgcagaagccaaatgcaaaaagattttcaatgacttgaaaattgaacagctataccacgaatatgaagagtctattgccaaggatttgaaggccaaaatttctcaggtcgatgagtctcgtggcttcaaagctgatgtcttaactgcgttcttgaacaaagtttacaagagaagcaaaggttctggatcagccgggagcgaccagatagaaggaagtcctcatcacgagtctgataactccattgcgacaaaaatcctgaatttcggtcatacgtgctggaagttacaaaggccctatgtcgtgaaaggtttgatttcgatagcttgtggcttgtttggtcgcgaactatttcataataccaaccttttatcttggtcattgatgctcaaggcattctcatccttaatggtaatcctttcttttaatttctttgctgccataatgaatcaaatttacgatgttgatattgaccgaattaacaaaccagatttgccactcgttagtggagagatgagtatcgaaactgcatggatactatcgatcattgtcgctctgacaggcttaatattgactattaagcttaattgtggtccgctatttatatcattgtattgcgtatctttgttcgctggatttgcatacagcgttcctccaattcgttggaaacagtatcctttcaccaacttcttaataactatcagctcacacgtgggtgttaactttacatgttattacgcctccagagcagcctttggcttacccttcgaaatgtctccgccatttacttttattctcgcttttatgaccgtaatgggaatgacaatagctttcgcgaaagacatttcagatatcgaaggtgatgcgaaatatggggtgtctactgttgctacgaagttaggtgcaagaaatatgacgtttgttgtcagtggtgtcttgttgctgacatacgtaagcgctatacttgcagctatcatttggccgcaagcctttaagtcaaatgtgatgttgttatctcatgccatcctggcgttctgcctaattttcagaactagagagctagcgcttgcaaattatgcttctgcacctagtaggcagttttttgaatttatctggaaattgcattatgcagagtacttagtttatgttttcatc

SEQ ID NO: 345 - DNA, 2028 bp, Artificial Sequence
  Synthetic
atggcttcagaaaaagaaattaggagagagagattcttgaacgttttccctaaattagtagaggaattgaacgcatcgcttttggcttacggtatgcctaaggaagcatgtgactggtatgcccactcattgaactacaacactccaggcggtaagctaaatagaggtttgtccgttgtggacacgtatgctattctctccaacaagaccgttgaacaattggggcaagaagaatacgaaaaggttgccattctaggttggtgcattgagttgttgcaggcttactggttggtcgccgatgatatgatggacaagtccattaccagaagaggccaaccatgttggtacaaggttcctgaagttggggaaattgccatctgggacgcattcatgttagaggctgctatctacaagcttttgaaatctcacttcagaaacgaaaaatactacatagatatcaccgaattgttccatgaggtcaccttccaaaccgaattgggccaattgatggacttaatcactgcacctgaagacaaagtcgacttgagtaagttctccctaaagaagcactccttcatagttactttcaagactgcttactattctttctacttgcctgtcgcattggccatgtacgttgccggtatcacggatgaaaaggatttgaaacaagccagagatgtcttgattccattgggtgaatacttccaaattcaagatgactacttagactgcttcggtaccccagaacagatcggtaagatcggtacagatatccaagataacaaatgttcttgggtaatcaacaaggcattggaacttgcttccgcagaacaaagaaagactttagacgaaaattacggtaagaaggactcagtcgcagaagccaaatgcaaaaagattttcaatgacttgaaaattgaacagctataccacgaatatgaagagtctattgccaaggatttgaaggccaaaatttctcaggtcgatgagtctcgtggcttcaaagctgatgtcttaactgcgttcttgaacaaagtttacaagagaagcaaaggttctggatctgcaggatccgaccagatcgagggctcacctcaccatgaatcggataatagcattgccacaaagatactcaactttgggcatacttgttggaaattacaaagaccctacgttgtgaaaggtatgatttcaatcgcttgcggtctattcggtaaggaattgcttcacaatacgaacctgattagttggagcttgatgttcaaagcgttttttgctttagtaccgatactttctttcaattttttcgcagctatcatgaaccaaatttatgatgtcgacatagataggattaataagccagatttaccattggtttccggagagatgagtatagaaaccgcctggatactctcaattattgtcgcactaactggcttgatcgttacaataaaaatgaaaggtgggcctttgtttgtatttatttatattttcggaattttcgcaggttttgcttactctgtgccacctatccgatggaagcaatatccatttacaaactttctgattaccataagttcccatgttggcctggcctttacttcttattacgcgtctagagcggctttaggtttaccgttcgaacttagaccctcttttagcttcatcattgcctttatgactgtgatgggtatgacgatagcttttgcaaaagacatctcagatattgaaggcgatgccaaatatggggtttccactgtagcaacaaagctaggagctcgtaatatgaccttcgttgtctcgggggtgttactactgaattaccttgtatcgatcagtattggtataatttggccacaggtttttaaatctaacattacagtactgggtcacactatcttggcatcaatcttgtggaccaatgctaaatcagtggatttatctagtaaggctgccataacttccttctacatgttcatatggaaattgttctatgctgagtacctcttaataccactggttcgg

SEQ ID NO: 346 - DNA, 2031 bp, Artificial Sequence
  Synthetic
atggcttcagaaaaagaaattaggagagagagattcttgaacgttttccctaaattagtagaggaattgaacgcatcgcttttggcttacggtatgcctaaggaagcatgtgactggtatgcccactcattgaactacaacactccaggcggtaagctaaatagaggtttgtccgttgtggacacgtatgctattctctccaacaagaccgttgaacaattggggcaagaagaatacgaaaaggttgccattctaggttggtgcattgagttgttgcaggcttactggttggtcgccgatgatatgatggacaagtccattaccagaagaggccaaccatgttggtacaaggttcctgaagttggggaaattgccatctgggacgcattcatgttagaggctgctatctacaagcttttgaaatctcacttcagaaacgaaaaatactacatagatatcaccgaattgttccatgaggtcaccttccaaaccgaattgggccaattgatggacttaatcactgcacctgaagacaaagtcgacttgagtaagttctccctaaagaagcactccttcatagttactttcaagactgcttactattctttctacttgcctgtcgcattggccatgtacgttgccggtatcacggatgaaaaggatttgaaacaagccagagatgtcttgattccattgggtgaatacttccaaattcaagatgactacttagactgcttcggtaccccagaacagatcggtaagatcggtacagatatccaagataacaaatgttcttgggtaatcaacaaggcattggaacttgcttccgcagaacaaagaaagactttagacgaaaattacggtaagaaggactcagtcgcagaagccaaatgcaaaaagattttcaatgacttgaaaattgaacagctataccacgaatatgaagagtctattgccaaggatttgaaggccaaaatttctcaggtcgatgagtctcgtggcttcaaagctgatgtcttaactgcgttcttgaacaaagtttacaagagaagcaaaggttctggatcagccgggagcgaccagatagaaggaagtcctcatcacgagtctgataactccattgcgacaaaaatcctgaatttcggtcatacgtgctggaagttacaaaggccctatgtcgtgaaaggtatgatttcgatagcttgtggcttgtttggtcgcgaactatttcataataccaaccttttatcttggtcattgatgctcaaggcattctcatccttaatggtaatcctttcttttaatttctttgctgccataatgaatcaaatttacgatgttgatattgaccgaattaacaaaccagatttgccactcgttagtggagagatgagtatcgaaactgcatggatactatcgatcattgtcgctctgacaggcttaatattgactattaagcttaattgtggtccgctatttatatcattgtattgcgtatctttattcgctggatttgcatacagcgttcctccaattcgttggaaacagtatcctttcaccaacttcttaataactatcagctcacacgtgggtgttaactttacatgttattacgcctccagagcagcctttggcttacccttcgaaatgtctccgccatttacttttattctcgcttttatgaccgtaatgggaatgacaatagctttcgcgaaagacatttcagatatcgaaggtgatgcgaaatatggggtgtctactgttgctacgaagttaggtgcaagaaatatgacgtttgttgtcagtggtgtcttgttgctgacatacgtaagcgctatacttgcagctatcatttggccgcaagcctttaagtcaaatgtgatgttgttatctcatgccatcctggcgttctgcctaattttcagaactagagagctagcgcttgcaaattatgcttctgcacctagtaggcagttttttgaatttatctggaaattgcattatgcagagtacttagtttatgttttcatc

SEQ ID NO: 347 - DNA, 2031 bp, Artificial Sequence
  Synthetic
atggcttcagaaaaagaaattaggagagagagattcttgaacgttttccctaaattagtagaggaattgaacgcatcgcttttggcttacggtatgcctaaggaagcatgtgactggtatgcccactcattgaactacaacactccaggcggtaagctaaatagaggtttgtccgttgtggacacgtatgctattctctccaacaagaccgttgaacaattggggcaagaagaatacgaaaaggttgccattctaggttggtgcattgagttgttgcaggcttactggttggtcgccgatgatatgatggacaagtccattaccagaagaggccaaccatgttggtacaaggttcctgaagttggggaaattgccatctgggacgcattcatgttagaggctgctatctacaagcttttgaaatctcacttcagaaacgaaaaatactacatagatatcaccgaattgttccatgaggtcaccttccaaaccgaattgggccaattgatggacttaatcactgcacctgaagacaaagtcgacttgagtaagttctccctaaagaagcactccttcatagttactttcaagactgcttactattctttctacttgcctgtcgcattggccatgtacgttgccggtatcacggatgaaaaggatttgaaacaagccagagatgtcttgattccattgggtgaatacttccaaattcaagatgactacttagactgcttcggtaccccagaacagatcggtaagatcggtacagatatccaagataacaaatgttcttgggtaatcaacaaggcattggaacttgcttccgcagaacaaagaaagactttagacgaaaattacggtaagaaggactcagtcgcagaagccaaatgcaaaaagattttcaatgacttgaaaattgaacagctataccacgaatatgaagagtctattgccaaggatttgaaggccaaaatttctcaggtcgatgagtctcgtggcttcaaagctgatgtcttaactgcgttcttgaacaaagtttacaagagaagcaaaggttctggatcagccgggagcgaccagatagaaggaagtcctcatcacgagtctgataactccattgcgacaaaaatcctgaatttcggtcatacgtgctggaagttacaaaggccctatgtcgtgaaaggtatgatttcgatagcttgtggcttgtttggtcgcgaactatttcataataccaaccttttatcttggtcattgatgctcaaggcattctcatccttaatggtaatcctttcttttaatttctttgctgccataatgaatcaaatttacgatgttgatattgaccgaattaacaaaccagatttgccactcgttagtggagagatgagtatcgaaactgcatggatactatcgatcattgtcgctctgacaggcttaatattgactattaagcttaattgtggtccgctatttatatcattgtattgcgtatctattttcgctggatttgcatacagcgttcctccaattcgttggaaacagtatcctttcaccaacttcttaataactatcagctcacacgtgggtgttaactttacatgttattacgcctccagagcagcctttggcttacccttcgaaatgtctccgccatttacttttattctcgcttttatgaccgtaatgggaatgacaatagctttcgcgaaagacatttcagatatcgaaggtgatgcgaaatatggggtgagaactgttgctacgaagttaggtgcaagaaatatgacgtttgttgtcagtggtgtcttgttgctgacatacgtaagcgctatacttgcagctatcatttggccgcaagcctttaagtcaaatgtgatgttgttatctcatgccatcctggcgttctgcctaattttcaggactagagagctagcgcttgcaaattatgcttctgcacctagtaggcagttttttgaatttatctggaaattgcattatgcagagtacttagtttatgttttcatc

SEQ ID NO: 348 - DNA, 2031 bp, Artificial Sequence
  Synthetic
atggcttcagaaaaagaaattaggagagagagattcttgaacgttttccctaaattagtagaggaattgaacgcatcgcttttggcttacggtatgcctaaggaagcatgtgactggtatgcccactcattgaactacaacactccaggcggtaagctaaatagaggtttgtccgttgtggacacgtatgctattctctccaacaagaccgttgaacaattggggcaagaagaatacgaaaaggttgccattctaggttggtgcattgagttgttgcaggcttactggttggtcgccgatgatatgatggacaagtccattaccagaagaggccaaccatgttggtacaaggttcctgaagttggggaaattgccatctgggacgcattcatgttagaggctgctatctacaagcttttgaaatctcacttcagaaacgaaaaatactacatagatatcaccgaattgttccatgaggtcaccttccaaaccgaattgggccaattgatggacttaatcactgcacctgaagacaaagtcgacttgagtaagttctccctaaagaagcactccttcatagttactttcaagactgcttactattctttctacttgcctgtcgcattggccatgtacgttgccggtatcacggatgaaaaggatttgaaacaagccagagatgtcttgattccattgggtgaatacttccaaattcaagatgactacttagactgcttcggtaccccagaacagatcggtaagatcggtacagatatccaagataacaaatgttcttgggtaatcaacaaggcattggaacttgcttccgcagaacaaagaaagactttagacgaaaattacggtaagaaggactcagtcgcagaagccaaatgcaaaaagattttcaatgacttgaaaattgaacagctataccacgaatatgaagagtctattgccaaggatttgaaggccaaaatttctcaggtcgatgagtctcgtggcttcaaagctgatgtcttaactgcgttcttgaacaaagtttacaagagaagcaaaggttctggatccgcaggatcagatcaaatagaagggagcccccatcacgagtcggacaacagtatcgcgacaaaaattcttaattttggccatactttctggaagttacagcgtccttacgtagttaaaggtctgatttctatcgcttgcggtttgttcggtaaggaactactccacaatacgaacttgatatcatggtctttaatgtttaaagccttctttgctctggtcccaattctaagtttcaattttttcgcagcctcggtgaatcaaatctatgatgttgagatagataggattaacaagccggatttaccactcgtgtccggagaaatgtctatagagacagcttggatcctgtcgattattgtcgctcttactggcttgatagttaccattaaaatgaaaggtggccctttatttgtgtttatctatatatttggtctattcgcaggttttgcttactctgtacctccaattcgatggaagcagtatccgttcactaactttttgatcaccatttcaagccatgttggactagccttcacatcctactatgcttctagagccgcgcttggtctaccatttgaactgcgcccctcatttagttttataattgcattcatgacagttatggggatgactattgcctttgcaaaggacatttcagatattgaaggagatgcaaaatatggtgtcaggacggtagctactaaattaggtgctagaaatatgaccagagttgtgtcgggggtgttgctattaaattacttagtcagtattttggcaggaataatctggccccaagcttttaattcaaatgtcatgatcttatcgcacgcaattttggccttctgtctcatctttcaaacgagagaattagcccttgctaactacgcaagtgctccttcccgtcaatttttcgagtttatttggaatctgtattatgcggaatacctggtatacgttttcatt

SEQ ID NO: 349 - DNA, 2031 bp, Artificial Sequence
  Synthetic
atggcttcagaaaaagaaattaggagagagagattcttgaacgttttccctaaattagtagaggaattgaacgcatcgcttttggcttacggtatgcctaaggaagcatgtgactggtatgcccactcattgaactacaacactccaggcggtaagctaaatagaggtttgtccgttgtggacacgtatgctattctctccaacaagaccgttgaacaattggggcaagaagaatacgaaaaggttgccattctaggttggtgcattgagttgttgcaggcttactggttggtcgccgatgatatgatggacaagtccattaccagaagaggccaaccatgttggtacaaggttcctgaagttggggaaattgccatctgggacgcattcatgttagaggctgctatctacaagcttttgaaatctcacttcagaaacgaaaaatactacatagatatcaccgaattgttccatgaggtcaccttccaaaccgaattgggccaattgatggacttaatcactgcacctgaagacaaagtcgacttgagtaagttctccctaaagaagcactccttcatagttactttcaagactgcttactattctttctacttgcctgtcgcattggccatgtacgttgccggtatcacggatgaaaaggatttgaaacaagccagagatgtcttgattccattgggtgaatacttccaaattcaagatgactacttagactgcttcggtaccccagaacagatcggtaagatcggtacagatatccaagataacaaatgttcttgggtaatcaacaaggcattggaacttgcttccgcagaacaaagaaagactttagacgaaaattacggtaagaaggactcagtcgcagaagccaaatgcaaaaagattttcaatgacttgaaaattgaacagctataccacgaatatgaagagtctattgccaaggatttgaaggccaaaatttctcaggtcgatgagtctcgtggcttcaaagctgatgtcttaactgcgttcttgaacaaagtttacaagagaagcaaaggttctggatcagccgggagcgaccagatagaaggaagtcctcatcacgagtctgataactccattgcgacaaaaatcctgaatttcggtcatacgtgctggaagttacaaaggccctatgtcgtgaaaggtctaatttcgatagcttgtggcttgtttggtcgcgaactatttcataataccaaccttttatcttggtcattgatgctcaaggcattctcatccttaatggtaatcctttcttttaatttctttgctgccataatgaatcaaatttacgatgttgatattgaccgaattaacaaaccagatttgccactcgttagtggagagatgagtatcgaaactgcatggatactatcgatcattgtcgctctgacaggcttaatattgactattaagcttaattgtggtccgctatttatatcattgtattgcgtatctattttcgctggatttgcatacagcgttcctccaattcgttggaaacagtatcctttcaccaacttcttaataactatcagctcacacgtgggtgttaactttacatgttattacgcctccagagcagcctttggcttacccttcgaaatgtctccgccatttacttttattctcgcttttatgaccgtaatgggaatgacaatagctttcgcgaaagacatttcagatatcgaaggtgatgcgaaatatggggtgagaactgttgctacgaagttaggtgcaagaaatatgacgtttgttgtcagtggtgtcttgttgctgacatacgtaagcgctatacttgcagctatcatttggccgcaagcctttaagtcaaatgtgatgttgttatctcatgccatcctggcgttctgcctaattttcaggactagagagctagcgcttgcaaattatgcttctgcacctagtaggcagttttttgaatttatctggaaattgcattatgcagagtacttagtttatgttttcatc

SEQ ID NO: 350 - DNA, 2028 bp, Artificial Sequence
  Synthetic
atggcttcagaaaaagaaattaggagagagagattcttgaacgttttccctaaattagtagaggaattgaacgcatcgcttttggcttacggtatgcctaaggaagcatgtgactggtatgcccactcattgaactacaacactccaggcggtaagctaaatagaggtttgtccgttgtggacacgtatgctattctctccaacaagaccgttgaacaattggggcaagaagaatacgaaaaggttgccattctaggttggtgcattgagttgttgcaggcttactggttggtcgccgatgatatgatggacaagtccattaccagaagaggccaaccatgttggtacaaggttcctgaagttggggaaattgccatctgggacgcattcatgttagaggctgctatctacaagcttttgaaatctcacttcagaaacgaaaaatactacatagatatcaccgaattgttccatgaggtcaccttccaaaccgaattgggccaattgatggacttaatcactgcacctgaagacaaagtcgacttgagtaagttctccctaaagaagcactccttcatagttactttcaagactgcttactattctttctacttgcctgtcgcattggccatgtacgttgccggtatcacggatgaaaaggatttgaaacaagccagagatgtcttgattccattgggtgaatacttccaaattcaagatgactacttagactgcttcggtaccccagaacagatcggtaagatcggtacagatatccaagataacaaatgttcttgggtaatcaacaaggcattggaacttgcttccgcagaacaaagaaagactttagacgaaaattacggtaagaaggactcagtcgcagaagccaaatgcaaaaagattttcaatgacttgaaaattgaacagctataccacgaatatgaagagtctattgccaaggatttgaaggccaaaatttctcaggtcgatgagtctcgtggcttcaaagctgatgtcttaactgcgttcttgaacaaagtttacaagagaagcaaaggttctggaagtgcgggtagcgaccaaattgaagggtcaccccatcacgagtctgataattccatcgcaacgaaaatattgaacttcggacatacctgttggaagctccagcgcccatacgtagtcaaaggtatgattagtatcgcttgcggcttatttggcaaggaactgcttcacaatacaaacctaatttcgtggtctttgatgtttaaagccttctttgctctcgttccgatattatcatttaatttctttgcagccattatgaaccaaatctatgatgtggatatagacaggattaataagcctgatctaccattagtttctggtgaaatgtccattgaaactgcttggattttatcgataatcgttgcattgaccggtcttatcgtcactataaaaatgaaaggaggtcctctgttcgtgtttatttatatattcggaatctttgctggtttcgcgtacagcgtaccccctattcgttggaagcaatatccatttacaaattttttgatcactattagctcacatgttggtttggcttttacgtcttactatgcctcaagagcagccttaggattgccgttcgagctaagaccatccttcagttttatcatagcttttatgactgtaatgggcatgacaatagcattcgcaaaggacatatctgacattgagggggatgcgaaatacggtgtatcaactgttgctacaaaattaggagctcgaaacatgacctttgtggtcagtggggtcctactcttgaattatcttgtatctattcttgctgggattatttggcctcaggcctttaactccaatgttacagttctcggtcatacaatcttagcttctatcctgtggacgaatgctaaatctgttgatctatcgtcgaaggccgcaataacatcattttacatgttcatctggaaactgttctatgcggaatacttactaatcccactggttaga

SEQ ID NO: 351 - DNA, 2031 bp, Artificial Sequence
  Synthetic
atggcttcagaaaaagaaattaggagagagagattcttgaacgttttccctaaattagtagaggaattgaacgcatcgcttttggcttacggtatgcctaaggaagcatgtgactggtatgcccactcattgaactacaacactccaggcggtaagctaaatagaggtttgtccgttgtggacacgtatgctattctctccaacaagaccgttgaacaattggggcaagaagaatacgaaaaggttgccattctaggttggtgcattgagttgttgcaggcttactggttggtcgccgatgatatgatggacaagtccattaccagaagaggccaaccatgttggtacaaggttcctgaagttggggaaattgccatctgggacgcattcatgttagaggctgctatctacaagcttttgaaatctcacttcagaaacgaaaaatactacatagatatcaccgaattgttccatgaggtcaccttccaaaccgaattgggccaattgatggacttaatcactgcacctgaagacaaagtcgacttgagtaagttctccctaaagaagcactccttcatagttactttcaagactgcttactattctttctacttgcctgtcgcattggccatgtacgttgccggtatcacggatgaaaaggatttgaaacaagccagagatgtcttgattccattgggtgaatacttccaaattcaagatgactacttagactgcttcggtaccccagaacagatcggtaagatcggtacagatatccaagataacaaatgttcttgggtaatcaacaaggcattggaacttgcttccgcagaacaaagaaagactttagacgaaaattacggtaagaaggactcagtcgcagaagccaaatgcaaaaagattttcaatgacttgaaaattgaacagctataccacgaatatgaagagtctattgccaaggatttgaaggccaaaatttctcaggtcgatgagtctcgtggcttcaaagctgatgtcttaactgcgttcttgaacaaagtttacaagagaagcaaaggttctggatcagccgggagcgaccagatagaaggaagtcctcatcacgagtctgataactccattgcgacaaaaatcctgaatttcggtcatacgtgctggaagttacaaaggccctatgtcgtgaaaggtatgatttcgatagcttgtggcttgtttggtcgcgaactatttcataataccaaccttttatcttggtcattgatgctcaaggcattctcatccttaatggtaatcctttcttttaatttctttgctgccataatgaatcaaatttacgatgttgatattgaccgaattaacaaaccagatttgccactcgttagtggagagatgagtatcgaaactgcatggatactatcgatcattgtcgctctgacaggcttaatattgactattaagcttaattgtggtccgctatttatatcattgtattgcgtatctattttcgctggatttgcatacagcgttcctccaattcgttggaaaagatatcctttcaccaacttcttaataactatcagctcacacgtgggtgttaactttacatgttattacgcctccagagcagcctttggcttacccttcgaaatgtctccgccatttacttttattctcgcttttatgaccgtaatgggaatgacaatagctttcgcgaaagacatttcagatatcgaaggtgatgcgaaatatggggtgtctactgttgctacgaagttaggtgcaagaaatatgacgtttgttgtcagtggtgtcttgttgctgacatacgtaagcgctatacttgcagctatcatttggccgcaagcctttaagtcaaatgtgatgttgttatctcatgccatcctggcgttctgcctaattttcaggactagagagctagcgcttgcaaattatgcttctgcacctagtaggcagttttttgaatttatctggaaattgcattatgcagagtacttagtttatgttttcatc

SEQ ID NO: 352 - DNA, 2031 bp, Artificial Sequence
  Synthetic
atggcttcagaaaaagaaattaggagagagagattcttgaacgttttccctaaattagtagaggaattgaacgcatcgcttttggcttacggtatgcctaaggaagcatgtgactggtatgcccactcattgaactacaacactccaggcggtaagctaaatagaggtttgtccgttgtggacacgtatgctattctctccaacaagaccgttgaacaattggggcaagaagaatacgaaaaggttgccattctaggttggtgcattgagttgttgcaggcttactggttggtcgccgatgatatgatggacaagtccattaccagaagaggccaaccatgttggtacaaggttcctgaagttggggaaattgccatctgggacgcattcatgttagaggctgctatctacaagcttttgaaatctcacttcagaaacgaaaaatactacatagatatcaccgaattgttccatgaggtcaccttccaaaccgaattgggccaattgatggacttaatcactgcacctgaagacaaagtcgacttgagtaagttctccctaaagaagcactccttcatagttactttcaagactgcttactattctttctacttgcctgtcgcattggccatgtacgttgccggtatcacggatgaaaaggatttgaaacaagccagagatgtcttgattccattgggtgaatacttccaaattcaagatgactacttagactgcttcggtaccccagaacagatcggtaagatcggtacagatatccaagataacaaatgttcttgggtaatcaacaaggcattggaacttgcttccgcagaacaaagaaagactttagacgaaaattacggtaagaaggactcagtcgcagaagccaaatgcaaaaagattttcaatgacttgaaaattgaacagctataccacgaatatgaagagtctattgccaaggatttgaaggccaaaatttctcaggtcgatgagtctcgtggcttcaaagctgatgtcttaactgcgttcttgaacaaagtttacaagagaagcaaaggttctggatccgcaggatcagatcaaatagaagggagcccccatcacgagtcggacaacagtatcgcgacaaaaattcttaattttggccatacttgttggaagttacagcgtccttacgtagttaaaggtctaatttctatcgcttgcggtttgttcggtaaggaactactccacaatacgaacttgatatcatggtctttaatgtttaaagccttctttgctctggtcccaattctaagtttcaattttttcgcagcctccgtgaatcaaatctatgatgttgagatagataggattaacaagccggatttaccactcgtgtccggagaaatgtctatagagacagcttggatcctgtcgattattgtcgctcttactggcttgatagttaccattaaaatgaaaggtggccctttatttgtgtttatctatatatttggtttgttcgcaggttttgcttactctgtacctccaattcgatggaagcagtatccgttcactaactttttgatcaccatttcaagccatgttggactagccttcacatcctactatgcttctagagccgcgcttggtctaccatttgaactgcgcccctcatttagttttataattgcattcatgacagttatggggatgactattgcctttgcaaaggacatttcagatattgaaggagatgcaaaatatggtgtcagaacggtagctactaaattaggtgctagaaatatgaccagggttgtgtcgggggtgttgctattaaattacttagtcagtattttggcaggaataatctggccccaagcttttaattcaaatgtcatgatcttatcgcacgcaattttggccttctgtctcatctttagaacgagagaattagcccttgctaactacgcaagtgctccttcccgtcaatttttcgagtttatttggaacctgtattatgcggaatacctggtatacgttttcatt

SEQ ID NO: 353 - DNA, 2031 bp, Artificial Sequence
  Synthetic
atggcttcagaaaaagaaattaggagagagagattcttgaacgttttccctaaattagtagaggaattgaacgcatcgcttttggcttacggtatgcctaaggaagcatgtgactggtatgcccactcattgaactacaacactccaggcggtaagctaaatagaggtttgtccgttgtggacacgtatgctattctctccaacaagaccgttgaacaattggggcaagaagaatacgaaaaggttgccattctaggttggtgcattgagttgttgcaggcttactggttggtcgccgatgatatgatggacaagtccattaccagaagaggccaaccatgttggtacaaggttcctgaagttggggaaattgccatctgggacgcattcatgttagaggctgctatctacaagcttttgaaatctcacttcagaaacgaaaaatactacatagatatcaccgaattgttccatgaggtcaccttccaaaccgaattgggccaattgatggacttaatcactgcacctgaagacaaagtcgacttgagtaagttctccctaaagaagcactccttcatagttactttcaagactgcttactattctttctacttgcctgtcgcattggccatgtacgttgccggtatcacggatgaaaaggatttgaaacaagccagagatgtcttgattccattgggtgaatacttccaaattcaagatgactacttagactgcttcggtaccccagaacagatcggtaagatcggtacagatatccaagataacaaatgttcttgggtaatcaacaaggcattggaacttgcttccgcagaacaaagaaagactttagacgaaaattacggtaagaaggactcagtcgcagaagccaaatgcaaaaagattttcaatgacttgaaaattgaacagctataccacgaatatgaagagtctattgccaaggatttgaaggccaaaatttctcaggtcgatgagtctcgtggcttcaaagctgatgtcttaactgcgttcttgaacaaagtttacaagagaagcaaaggttctggatcagccgggagcgaccagatagaaggaagtcctcatcacgagtctgataactccattgcgacaaaaatcctgaatttcggtcatacgtgctggaagttacaaaggccctatgtcgtgaaaggtctaatttcgatagcttgtggcttgtttggtcgcgaactatttcataataccaaccttttatcttggtcattgatgctcaaggcattctcatccttaatggtaatcctttcttttaatttctttgctgccataatgaatcaaatttacgatgttgatattgaccgaattaacaaaccagatttgccactcgttagtggagagatgagtatcgaaactgcatggatactatcgatcattgtcgctctgacaggcttaatattgactattaagcttaattgtggtccgctatttatatcattgtattgcgtatctattttcgctggatttgcatacagcgttcctccaattcgttggaaaagatatcctttcaccaacttcttaataactatcagctcacacgtgggtgttaactttacatgttattacgcctccagagcagcctttggcttacccttcgaaatgtctccgccatttacttttattctcgcttttatgaccgtaatgggaatgacaatagctttcgcgaaagacatttcagatatcgaaggtgatgcgaaatatggggtgtctactgttgctacgaagttaggtgcaagaaatatgacgtttgttgtcagtggtgtcttgttgctgacatacgtaagcgctatacttgcagctatcatttggccgcaagcctttaagtcaaatgtgatgttgttatctcatgccatcctggcgttctgcctaattttcaggactagagagctagcgcttgcaaattatgcttctgcacctagtaggcagttttttgaatttatctggaaattgcattatgcagagtacttagtttatgttttcatc

SEQ ID NO: 354 - DNA, 2028 bp, Artificial Sequence
  Synthetic
atggcttcagaaaaagaaattaggagagagagattcttgaacgttttccctaaattagtagaggaattgaacgcatcgcttttggcttacggtatgcctaaggaagcatgtgactggtatgcccactcattgaactacaacactccaggcggtaagctaaatagaggtttgtccgttgtggacacgtatgctattctctccaacaagaccgttgaacaattggggcaagaagaatacgaaaaggttgccattctaggttggtgcattgagttgttgcaggcttactggttggtcgccgatgatatgatggacaagtccattaccagaagaggccaaccatgttggtacaaggttcctgaagttggggaaattgccatctgggacgcattcatgttagaggctgctatctacaagcttttgaaatctcacttcagaaacgaaaaatactacatagatatcaccgaattgttccatgaggtcaccttccaaaccgaattgggccaattgatggacttaatcactgcacctgaagacaaagtcgacttgagtaagttctccctaaagaagcactccttcatagttactttcaagactgcttactattctttctacttgcctgtcgcattggccatgtacgttgccggtatcacggatgaaaaggatttgaaacaagccagagatgtcttgattccattgggtgaatacttccaaattcaagatgactacttagactgcttcggtaccccagaacagatcggtaagatcggtacagatatccaagataacaaatgttcttgggtaatcaacaaggcattggaacttgcttccgcagaacaaagaaagactttagacgaaaattacggtaagaaggactcagtcgcagaagccaaatgcaaaaagattttcaatgacttgaaaattgaacagctataccacgaatatgaagagtctattgccaaggatttgaaggccaaaatttctcaggtcgatgagtctcgtggcttcaaagctgatgtcttaactgcgttcttgaacaaagtttacaagagaagcaaaggttctggaagtgcgggttcagaccagattgaaggatccccccatcacgagtctgataatagcatagccacaaaaatcctgaacttcgggcatacttgctggaagctccaacgaccttacgtggttaaaggtatgatttctatagcttgtggcctatttggtaaagaattattacataataccaacttgatttcgtggtcacttatgtttaaggcattctttgctttggtaccgatcctctctttcaattttttcgcagccattatgaatcaaatatatgatgtcgacattgataggatcaacaagccagatttgccattagttagtggagaaatgtccatcgagactgcttggattctatcgataattgtcgcgcttacaggcttgatcgttacgataaaaatgaaaggtgggcccttatttgtatttatttatatctttggaatattcgcaggcttcgcttacagcgtccctccaattcgttggaagcaatatccttttactaattttcttattacaatttcatcacacgtgggtttggccttcacctcttactatgctagcagagcagctctgggtttaccgttcgaattgcgcccatcctttagttttatcattgcatttatgactgtaatgggaatgacgatagcattcgccaaagacatctcagatatagagggagatgctaagtacggtgtttccaccgttgccactaaactaggcgcccggaatatgacattcgttgtatctggcgttttattactcaactaccttgtgagtattttggcaggtattatatggcctttcttgtggagcaaagtagttaccgtactgggtcatacaattttagcttcaatcctgtggactaacgctaaatctgtcgacctgtcttccaaggctgcgatcacaagtttttatatgtttatatggaaattgttttatgctgaatatcttttaattccattggtcaga

SEQ ID NO: 355 - DNA, 2031 bp, Artificial Sequence
  Synthetic
atggcttcagaaaaagaaattaggagagagagattcttgaacgttttccctaaattagtagaggaattgaacgcatcgcttttggcttacggtatgcctaaggaagcatgtgactggtatgcccactcattgaactacaacactccaggcggtaagctaaatagaggtttgtccgttgtggacacgtatgctattctctccaacaagaccgttgaacaattggggcaagaagaatacgaaaaggttgccattctaggttggtgcattgagttgttgcaggcttactggttggtcgccgatgatatgatggacaagtccattaccagaagaggccaaccatgttggtacaaggttcctgaagttggggaaattgccatctgggacgcattcatgttagaggctgctatctacaagcttttgaaatctcacttcagaaacgaaaaatactacatagatatcaccgaattgttccatgaggtcaccttccaaaccgaattgggccaattgatggacttaatcactgcacctgaagacaaagtcgacttgagtaagttctccctaaagaagcactccttcatagttactttcaagactgcttactattctttctacttgcctgtcgcattggccatgtacgttgccggtatcacggatgaaaaggatttgaaacaagccagagatgtcttgattccattgggtgaatacttccaaattcaagatgactacttagactgcttcggtaccccagaacagatcggtaagatcggtacagatatccaagataacaaatgttcttgggtaatcaacaaggcattggaacttgcttccgcagaacaaagaaagactttagacgaaaattacggtaagaaggactcagtcgcagaagccaaatgcaaaaagattttcaatgacttgaaaattgaacagctataccacgaatatgaagagtctattgccaaggatttgaaggccaaaatttctcaggtcgatgagtctcgtggcttcaaagctgatgtcttaactgcgttcttgaacaaagtttacaagagaagcaaaggttctggatcagccgggagcgaccagatagaaggaagtcctcatcacgagtctgataactccattgcgacaaaaatcctgaatttcggtcatacgtgctggaagttacaaaggccctatgtcgtgaaaggtatgatttcgatagcttgtggcttgtttggtcgcgaactatttcataataccaaccttttatcttggtcattgatgctcaaggcattctcatccttaatggtaatcctttcttttaatttctttgctgccagtatgaatcaaatttacgatgttgatattgaccgaattaacaaaccagatttgccactcgttagtggagagatgagtatcgaaactgcatggatactatcgatcattgtcgctctgacaggcttaatattgactattaagcttaattgtggtccgctatttatatcattgtattgcgtatctttgttcgctggatttgcatacagcgttcctccaattcgttggaaacagtatcctttcaccaacttcttaataactatcagctcacacgtgggtgttaactttacatgttattacgcctccagagcagcctttggcttacccttcgaaatgtctccgccatttacttttattctcgcttttatgaccgtaatgggaatgacaatagctttcgcgaaagacatttcagatatcgaaggtgatgcgaaatatggggtgtctactgttgctacgaagttaggtgcaagaaatatgacgtttgttgtcagtggtgtcttgttgctgacatacgtaagcgctatacttgcagctatcatttggccgcaagcctttaagtcaaatgtgatgttgttatctcatgccatcctggcgttctgcctaattttccaaactagagagctagcgcttgcaaattatgcttctgcacctagtaggcagttttttgaatttatctggaaattgcattatgcagagtacttagtttatgttttcatc

SEQ ID NO: 356 - DNA, 2031 bp, Artificial Sequence
  Synthetic
atggcttcagaaaaagaaattaggagagagagattcttgaacgttttccctaaattagtagaggaattgaacgcatcgcttttggcttacggtatgcctaaggaagcatgtgactggtatgcccactcattgaactacaacactccaggcggtaagctaaatagaggtttgtccgttgtggacacgtatgctattctctccaacaagaccgttgaacaattggggcaagaagaatacgaaaaggttgccattctaggttggtgcattgagttgttgcaggcttactggttggtcgccgatgatatgatggacaagtccattaccagaagaggccaaccatgttggtacaaggttcctgaagttggggaaattgccatctgggacgcattcatgttagaggctgctatctacaagcttttgaaatctcacttcagaaacgaaaaatactacatagatatcaccgaattgttccatgaggtcaccttccaaaccgaattgggccaattgatggacttaatcactgcacctgaagacaaagtcgacttgagtaagttctccctaaagaagcactccttcatagttactttcaagactgcttactattctttctacttgcctgtcgcattggccatgtacgttgccggtatcacggatgaaaaggatttgaaacaagccagagatgtcttgattccattgggtgaatacttccaaattcaagatgactacttagactgcttcggtaccccagaacagatcggtaagatcggtacagatatccaagataacaaatgttcttgggtaatcaacaaggcattggaacttgcttccgcagaacaaagaaagactttagacgaaaattacggtaagaaggactcagtcgcagaagccaaatgcaaaaagattttcaatgacttgaaaattgaacagctataccacgaatatgaagagtctattgccaaggatttgaaggccaaaatttctcaggtcgatgagtctcgtggcttcaaagctgatgtcttaactgcgttcttgaacaaagtttacaagagaagcaaaggttctggatcagccgggagcgaccagatagaaggaagtcctcatcacgagtctgataactccattgcgacaaaaatcctgaatttcggtcatacgtgctggaagttacaaaggccctatgtcgtgaaaggtctaatttcgatagcttgtggcttgtttggtcgcgaactatttcataataccaaccttttatcttggtcattgatgctcaaggcattctcatccttaatggtaatcctttcttttaatttctttgctgccagtatgaatcaaatttacgatgttgatattgaccgaattaacaaaccagatttgccactcgttagtggagagatgagtatcgaaactgcatggatactatcgatcattgtcgctctgacaggcttaatattgactattaagcttaattgtggtccgctatttatatcattgtattgcgtatctttattcgctggatttgcatacagcgttcctccaattcgttggaaacagtatcctttcaccaacttcttaataactatcagctcacacgtgggtgttaactttacatgttattacgcctccagagcagcctttggcttacccttcgaaatgtctccgccatttacttttattctcgcttttatgaccgtaatgggaatgacaatagctttcgcgaaagacatttcagatatcgaaggtgatgcgaaatatggggtgtctactgttgctacgaagttaggtgcaagaaatatgacgtttgttgtcagtggtgtcttgttgctgacatacgtaagcgctatacttgcagctatcatttggccgcaagcctttaagtcaaatgtgatgttgttatctcatgccatcctggcgttctgcctaattttccaaactagagagctagcgcttgcaaattatgcttctgcacctagtaggcagttttttgaatttatctggaaattgcattatgcagagtacttagtttatgttttcatc

SEQ ID NO: 357 - DNA, 2031 bp, Artificial Sequence
  Synthetic
atggcttcagaaaaagaaattaggagagagagattcttgaacgttttccctaaattagtagaggaattgaacgcatcgcttttggcttacggtatgcctaaggaagcatgtgactggtatgcccactcattgaactacaacactccaggcggtaagctaaatagaggtttgtccgttgtggacacgtatgctattctctccaacaagaccgttgaacaattggggcaagaagaatacgaaaaggttgccattctaggttggtgcattgagttgttgcaggcttactggttggtcgccgatgatatgatggacaagtccattaccagaagaggccaaccatgttggtacaaggttcctgaagttggggaaattgccatctgggacgcattcatgttagaggctgctatctacaagcttttgaaatctcacttcagaaacgaaaaatactacatagatatcaccgaattgttccatgaggtcaccttccaaaccgaattgggccaattgatggacttaatcactgcacctgaagacaaagtcgacttgagtaagttctccctaaagaagcactccttcatagttactttcaagactgcttactattctttctacttgcctgtcgcattggccatgtacgttgccggtatcacggatgaaaaggatttgaaacaagccagagatgtcttgattccattgggtgaatacttccaaattcaagatgactacttagactgcttcggtaccccagaacagatcggtaagatcggtacagatatccaagataacaaatgttcttgggtaatcaacaaggcattggaacttgcttccgcagaacaaagaaagactttagacgaaaattacggtaagaaggactcagtcgcagaagccaaatgcaaaaagattttcaatgacttgaaaattgaacagctataccacgaatatgaagagtctattgccaaggatttgaaggccaaaatttctcaggtcgatgagtctcgtggcttcaaagctgatgtcttaactgcgttcttgaacaaagtttacaagagaagcaaaggttctggatccgcaggatcagatcaaatagaagggagcccccatcacgagtcggacaacagtatcgcgacaaaaattcttaattttggccatactttctggaagttacagcgtccttacgtagttaaaggtctgatttctatcgcttgcggtttgttcggtaaggaactactccacaatacgaacttgatatcatggtctttaatgtttaaagccttctttgctctggtcccaattctaagtttcaattttttcgcagcctcagtgaatcaaatctatgatgttgaaatagataggattaacaagccggatttaccactcgtgtccggagaaatgtctatagagacagcttggatcctgtcgattattgtcgctcttactggcttgatagttaccattaaaatgaaaggtggccctttatttgtgtttatctatatatttggtttgttcgcaggttttgcttactctgtacctccaattcgatggaagcagtatccgttcactaactttttgatcaccatttcaagccatgttggactagccttcacatcctactatgcttctagagccgcgcttggtctaccatttgaactgcgcccctcatttagttttataattgcattcatgacagttatggggatgactattgcctttgcaaaggacatttcagatattgaaggagatgcaaaatatggtgtcagaacggtagctactaaattaggtgctagaaatatgaccttcgttgtgtcgggggtgttgctattaaattacttagtcagtattttggcaggaataatctggccccaagcttttaattcaaatgtcatgatcttatcgcacgcaattttggccttctgtctcatctttaggacgagagaattagcccttgctaactacgcaagtgctccttcccgtcaatttttcgagtttatttggaatctgtattatgcggaatacctggtatacgttttcatt

SEQ ID NO: 358 - DNA, 2028 bp, Artificial Sequence
  Synthetic
atggcttcagaaaaagaaattaggagagagagattcttgaacgttttccctaaattagtagaggaattgaacgcatcgcttttggcttacggtatgcctaaggaagcatgtgactggtatgcccactcattgaactacaacactccaggcggtaagctaaatagaggtttgtccgttgtggacacgtatgctattctctccaacaagaccgttgaacaattggggcaagaagaatacgaaaaggttgccattctaggttggtgcattgagttgttgcaggcttactggttggtcgccgatgatatgatggacaagtccattaccagaagaggccaaccatgttggtacaaggttcctgaagttggggaaattgccatctgggacgcattcatgttagaggctgctatctacaagcttttgaaatctcacttcagaaacgaaaaatactacatagatatcaccgaattgttccatgaggtcaccttccaaaccgaattgggccaattgatggacttaatcactgcacctgaagacaaagtcgacttgagtaagttctccctaaagaagcactccttcatagttactttcaagactgcttactattctttctacttgcctgtcgcattggccatgtacgttgccggtatcacggatgaaaaggatttgaaacaagccagagatgtcttgattccattgggtgaatacttccaaattcaagatgactacttagactgcttcggtaccccagaacagatcggtaagatcggtacagatatccaagataacaaatgttcttgggtaatcaacaaggcattggaacttgcttccgcagaacaaagaaagactttagacgaaaattacggtaagaaggactcagtcgcagaagccaaatgcaaaaagattttcaatgacttgaaaattgaacagctataccacgaatatgaagagtctattgccaaggatttgaaggccaaaatttctcaggtcgatgagtctcgtggcttcaaagctgatgtcttaactgcgttcttgaacaaagtttacaagagaagcaaaggttctggaagcgcaggatccgaccagattgagggctctccacatcacgaatcagataattcaatcgcgacaaaaatattaaacttcggtcatacttgctggaagctgcaacgtccttatgtagtgaaagggatgattagtatagcctgtggtctttttggtaaggaactattgcacaataccaacctcatctcgtggtctttaatgttcaaagctttttttgctttggttccgattttgagtttcaatttttttgccgcaattatgaatcaaatttacgatgtcgacatagataggatcaacaagccagacttacccctcgttagcggtgaaatgtctatagagactgcttggatcttgtccattatcgtagcactaacgggactaattgttacaattaaaatgaaaggcggacctcttttcgtctttatatatatattcggtatatttgccgggtttgcgtactcagttccacccattagatggaaacagtatcctttcacgaacttcttaattaccatcagctcccatgtggggctagcatttacatcttactatgctagtagagctgcgttgggtctgccatttgaattacgaccttctttctcttttattattgcattcatgactgtaatgggcatgaccatcgcttttgctaaagatatcagcgatatagaaggtgatgccaagtacggtgttagtactgtcgctacaaagcttggagcacggaatatgacatttgttgtgtcaggagtcttattattgaattatttggtatcgatatcaataggcatcatatggccgtttctatggtcgaaagtggttaccgtattgggtcatactattttggcctctattctttggacgaacgccaagagtgtcgatttgtcctccaaagccgcaataacatctttttacatgttcatttggaagttgttttatgcagaatatttattaattcccctggttaga

SEQ ID NO: 359 - DNA, 2031 bp, Artificial Sequence
  Synthetic
atggcttcagaaaaagaaattaggagagagagattcttgaacgttttccctaaattagtagaggaattgaacgcatcgcttttggcttacggtatgcctaaggaagcatgtgactggtatgcccactcattgaactacaacactccaggcggtaagctaaatagaggtttgtccgttgtggacacgtatgctattctctccaacaagaccgttgaacaattggggcaagaagaatacgaaaaggttgccattctaggttggtgcattgagttgttgcaggcttactggttggtcgccgatgatatgatggacaagtccattaccagaagaggccaaccatgttggtacaaggttcctgaagttggggaaattgccatctgggacgcattcatgttagaggctgctatctacaagcttttgaaatctcacttcagaaacgaaaaatactacatagatatcaccgaattgttccatgaggtcaccttccaaaccgaattgggccaattgatggacttaatcactgcacctgaagacaaagtcgacttgagtaagttctccctaaagaagcactccttcatagttactttcaagactgcttactattctttctacttgcctgtcgcattggccatgtacgttgccggtatcacggatgaaaaggatttgaaacaagccagagatgtcttgattccattgggtgaatacttccaaattcaagatgactacttagactgcttcggtaccccagaacagatcggtaagatcggtacagatatccaagataacaaatgttcttgggtaatcaacaaggcattggaacttgcttccgcagaacaaagaaagactttagacgaaaattacggtaagaaggactcagtcgcagaagccaaatgcaaaaagattttcaatgacttgaaaattgaacagctataccacgaatatgaagagtctattgccaaggatttgaaggccaaaatttctcaggtcgatgagtctcgtggcttcaaagctgatgtcttaactgcgttcttgaacaaagtttacaagagaagcaaaggttctggatcagccgggagcgaccagatagaaggaagtcctcatcacgagtctgataactccattgcgacaaaaatcctgaatttcggtcatacgtgctggaagttacaaaggccctatgtcgtgaaaggtatgatttcgatagcttgtggcttgtttggtcgcgaactatttcataataccaaccttttatcttggtcattgatgctcaaggcattctcatccttaatggtaatcctttcttttaatttctttgctgcctccatgaatcaaatttacgatgttgatattgaccgaattaacaaaccagatttgccactcgttagtggagagatgagtatcgaaactgcatggatactatcgatcattgtcgctctgacaggcttaatattgactattaagcttaattgtggtccgctatttatatcattgtattgcgtatctattttcgctggatttgcatacagcgttcctccaattcgttggaaacagtatcctttcaccaacttcttaataactatcagctcacacgtgggtgttaactttacatgttattacgcctccagagcagcctttggcttacccttcgaaatgtctccgccatttacttttattctcgcttttatgaccgtaatgggaatgacaatagctttcgcgaaagacatttcagatatcgaaggtgatgcgaaatatggggtgcgtactgttgctacgaagttaggtgcaagaaatatgacgtttgttgtcagtggtgtcttgttgctgacatacgtaagcgctatacttgcagctatcatttggccgcaagcctttaagtcaaatgtgatgttgttatctcatgccatcctggcgttctgcctaattttccaaactagagagctagcgcttgcaaattatgcttctgcacctagtaggcagttttttgaatttatctggaaattgcattatgcagagtacttagtttatgttttcatc

SEQ ID NO: 360 - DNA, 2031 bp, Artificial Sequence
  Synthetic
atggcttcagaaaaagaaattaggagagagagattcttgaacgttttccctaaattagtagaggaattgaacgcatcgcttttggcttacggtatgcctaaggaagcatgtgactggtatgcccactcattgaactacaacactccaggcggtaagctaaatagaggtttgtccgttgtggacacgtatgctattctctccaacaagaccgttgaacaattggggcaagaagaatacgaaaaggttgccattctaggttggtgcattgagttgttgcaggcttactggttggtcgccgatgatatgatggacaagtccattaccagaagaggccaaccatgttggtacaaggttcctgaagttggggaaattgccatctgggacgcattcatgttagaggctgctatctacaagcttttgaaatctcacttcagaaacgaaaaatactacatagatatcaccgaattgttccatgaggtcaccttccaaaccgaattgggccaattgatggacttaatcactgcacctgaagacaaagtcgacttgagtaagttctccctaaagaagcactccttcatagttactttcaagactgcttactattctttctacttgcctgtcgcattggccatgtacgttgccggtatcacggatgaaaaggatttgaaacaagccagagatgtcttgattccattgggtgaatacttccaaattcaagatgactacttagactgcttcggtaccccagaacagatcggtaagatcggtacagatatccaagataacaaatgttcttgggtaatcaacaaggcattggaacttgcttccgcagaacaaagaaagactttagacgaaaattacggtaagaaggactcagtcgcagaagccaaatgcaaaaagattttcaatgacttgaaaattgaacagctataccacgaatatgaagagtctattgccaaggatttgaaggccaaaatttctcaggtcgatgagtctcgtggcttcaaagctgatgtcttaactgcgttcttgaacaaagtttacaagagaagcaaaggttctggatcagccgggagcgaccagatagaaggaagtcctcatcacgagtctgataactccattgcgacaaaaatcctgaatttcggtcatacgtgctggaagttacaaaggccctatgtcgtgaaaggtcttatttcgatagcttgtggcttgtttggtcgcgaactatttcataataccaaccttttatcttggtcattgatgctcaaggcattctcatccttaatggtaatcctttcttttaatttctttgctgccagtatgaatcaaatttacgatgttgatattgaccgaattaacaaaccagatttgccactcgttagtggagagatgagtatcgaaactgcatggatactatcgatcattgtcgctctgacaggcttaatattgactattaagcttaattgtggtccgctatttatatcattgtattgcgtatctattttcgctggatttgcatacagcgttcctccaattcgttggaaacagtatcctttcaccaacttcttaataactatcagctcacacgtgggtgttaactttacatgttattacgcctccagagcagcctttggcttacccttcgaaatgtctccgccatttacttttattctcgcttttatgaccgtaatgggaatgacaatagctttcgcgaaagacatttcagatatcgaaggtgatgcgaaatatggggtgagaactgttgctacgaagttaggtgcaagaaatatgacgtttgttgtcagtggtgtcttgttgctgacatacgtaagcgctatacttgcagctatcatttggccgcaagcctttaagtcaaatgtgatgttgttatctcatgccatcctggcgttctgcctaattttccaaactagagagctagcgcttgcaaattatgcttctgcacctagtaggcagttttttgaatttatctggaaattgcattatgcagagtacttagtttatgttttcatc

SEQ ID NO: 361 - DNA, 2031 bp, Artificial Sequence
  Synthetic
atggcttcagaaaaagaaattaggagagagagattcttgaacgttttccctaaattagtagaggaattgaacgcatcgcttttggcttacggtatgcctaaggaagcatgtgactggtatgcccactcattgaactacaacactccaggcggtaagctaaatagaggtttgtccgttgtggacacgtatgctattctctccaacaagaccgttgaacaattggggcaagaagaatacgaaaaggttgccattctaggttggtgcattgagttgttgcaggcttactggttggtcgccgatgatatgatggacaagtccattaccagaagaggccaaccatgttggtacaaggttcctgaagttggggaaattgccatctgggacgcattcatgttagaggctgctatctacaagcttttgaaatctcacttcagaaacgaaaaatactacatagatatcaccgaattgttccatgaggtcaccttccaaaccgaattgggccaattgatggacttaatcactgcacctgaagacaaagtcgacttgagtaagttctccctaaagaagcactccttcatagttactttcaagactgcttactattctttctacttgcctgtcgcattggccatgtacgttgccggtatcacggatgaaaaggatttgaaacaagccagagatgtcttgattccattgggtgaatacttccaaattcaagatgactacttagactgcttcggtaccccagaacagatcggtaagatcggtacagatatccaagataacaaatgttcttgggtaatcaacaaggcattggaacttgcttccgcagaacaaagaaagactttagacgaaaattacggtaagaaggactcagtcgcagaagccaaatgcaaaaagattttcaatgacttgaaaattgaacagctataccacgaatatgaagagtctattgccaaggatttgaaggccaaaatttctcaggtcgatgagtctcgtggcttcaaagctgatgtcttaactgcgttcttgaacaaagtttacaagagaagcaaaggttctggatccgcaggatcagatcaaatagaagggagcccccatcacgagtcggacaacagtatcgcgacaaaaattcttaattttggccatactttctggaagttacagcgtccttacgtagttaaaggtctgatttctatcgcttgcggtttgttcggtaaggaactactccacaatacgaacttgatatcatggtctttaatgtttaaagccttctttgctctggtcccaattctaagtttcaattttttcgcagccagcatgaatcaaatctatgatgttgaaatagataggattaacaagccggatttaccactcgtgtccggagaaatgtctatagagacagcttggatcctgtcgattattgtcgctcttactggcttgatagttaccattaaaatgaaaggtggccctttatttgtgtttatctatatatttggtttgttcgcaggttttgcttactctgtacctccaattcgatggaagcagtatccgttcactaactttttgatcaccatttcaagccatgttggactagccttcacatcctactatgcttctagagccgcgcttggtctaccatttgaactgcgcccctcatttagttttataattgcattcatgacagttatggggatgactattgcctttgcaaaggacatttcagatattgaaggagatgcaaaatatggtgtcagaacggtagctactaaattaggtgctagaaatatgaccagggttgtgtcgggggtgttgctattaaattacttagtcagtattttggcaggaataatctggccccaagcttttaattcaaatgtcatgatcttatcgcacgcaattttggccttctgtctcatctttcggacgagagaattagcccttgctaactacgcaagtgctccttcccgtcaatttttcgagtttatttggaacctgtattatgcggaatacctggtatacgttttcatt

SEQ ID NO: 362 - DNA, 2031 bp, Artificial Sequence
  Synthetic
atggcttcagaaaaagaaattaggagagagagattcttgaacgttttccctaaattagtagaggaattgaacgcatcgcttttggcttacggtatgcctaaggaagcatgtgactggtatgcccactcattgaactacaacactccaggcggtaagctaaatagaggtttgtccgttgtggacacgtatgctattctctccaacaagaccgttgaacaattggggcaagaagaatacgaaaaggttgccattctaggttggtgcattgagttgttgcaggcttactggttggtcgccgatgatatgatggacaagtccattaccagaagaggccaaccatgttggtacaaggttcctgaagttggggaaattgccatctgggacgcattcatgttagaggctgctatctacaagcttttgaaatctcacttcagaaacgaaaaatactacatagatatcaccgaattgttccatgaggtcaccttccaaaccgaattgggccaattgatggacttaatcactgcacctgaagacaaagtcgacttgagtaagttctccctaaagaagcactccttcatagttactttcaagactgcttactattctttctacttgcctgtcgcattggccatgtacgttgccggtatcacggatgaaaaggatttgaaacaagccagagatgtcttgattccattgggtgaatacttccaaattcaagatgactacttagactgcttcggtaccccagaacagatcggtaagatcggtacagatatccaagataacaaatgttcttgggtaatcaacaaggcattggaacttgcttccgcagaacaaagaaagactttagacgaaaattacggtaagaaggactcagtcgcagaagccaaatgcaaaaagattttcaatgacttgaaaattgaacagctataccacgaatatgaagagtctattgccaaggatttgaaggccaaaatttctcaggtcgatgagtctcgtggcttcaaagctgatgtcttaactgcgttcttgaacaaagtttacaagagaagcaaaggttctggatccgcaggatcagatcaaatagaagggagcccccatcacgagtcggacaacagtatcgcgacaaaaattcttaattttggccatactttctggaagttacagcgtccttacgtagttaaaggtatgatttctatcgcttgcggtttgttcggtaaggaactactccacaatacgaacttgatatcatggtctttaatgtttaaagccttctttgctctggtcccaattctaagtttcaattttttcgcagcctctgttaatcaaatctatgatgttgaaatagataggattaacaagccggatttaccactcgtgtccggagaaatgtctatagagacagcttggatcctgtcgattattgtcgctcttactggcttgatagttaccattaaaatgaaaggtggccctttatttgtgtttatctatatatttggtttgttcgcaggttttgcttactctgtacctccaattcgatggaagcagtatccgttcactaactttttgatcaccatttcaagccatgttggactagccttcacatcctactatgcttctagagccgcgcttggtctaccatttgaactgcgcccctcatttagttttataattgcattcatgacagttatggggatgactattgcctttgcaaaggacatttcagatattgaaggagatgcaaaatatggtgtcagaacggtagctactaaattaggtgctagaaatatgaccagggttgtgtcgggggtgttgctattaaattacttagtcagtattttggcaggaataatctggccccaagcttttaattcaaatgtcatgatcttatcgcacgcaattttggccttctgtctcatctttagaacgagagaattagcccttgctaactacgcaagtgctccttcccgtcaatttttcgagtttatttggagactgtattatgcggaatacctggtatacgttttcatt

SEQ ID NO: 363 - DNA, 2031 bp, Artificial Sequence
  Synthetic
atggcttcagaaaaagaaattaggagagagagattcttgaacgttttccctaaattagtagaggaattgaacgcatcgcttttggcttacggtatgcctaaggaagcatgtgactggtatgcccactcattgaactacaacactccaggcggtaagctaaatagaggtttgtccgttgtggacacgtatgctattctctccaacaagaccgttgaacaattggggcaagaagaatacgaaaaggttgccattctaggttggtgcattgagttgttgcaggcttactggttggtcgccgatgatatgatggacaagtccattaccagaagaggccaaccatgttggtacaaggttcctgaagttggggaaattgccatctgggacgcattcatgttagaggctgctatctacaagcttttgaaatctcacttcagaaacgaaaaatactacatagatatcaccgaattgttccatgaggtcaccttccaaaccgaattgggccaattgatggacttaatcactgcacctgaagacaaagtcgacttgagtaagttctccctaaagaagcactccttcatagttactttcaagactgcttactattctttctacttgcctgtcgcattggccatgtacgttgccggtatcacggatgaaaaggatttgaaacaagccagagatgtcttgattccattgggtgaatacttccaaattcaagatgactacttagactgcttcggtaccccagaacagatcggtaagatcggtacagatatccaagataacaaatgttcttgggtaatcaacaaggcattggaacttgcttccgcagaacaaagaaagactttagacgaaaattacggtaagaaggactcagtcgcagaagccaaatgcaaaaagattttcaatgacttgaaaattgaacagctataccacgaatatgaagagtctattgccaaggatttgaaggccaaaatttctcaggtcgatgagtctcgtggcttcaaagctgatgtcttaactgcgttcttgaacaaagtttacaagagaagcaaaggttctggatcagccgggagcgaccagatagaaggaagtcctcatcacgagtctgataactccattgcgacaaaaatcctgaatttcggtcatacgtgctggaagttacaaaggccctatgtcgtgaaaggtatgatttcgatagcttgtggcttgtttggtcgcgaactatttcataataccaaccttttatcttggtcattgatgctcaaggcattctcatccttaatggtaatcctttcttttaatttctttgctgccagtatgaatcaaatttacgatgttgatattgaccgaattaacaaaccagatttgccactcgttagtggagagatgagtatcgaaactgcatggatactatcgatcattgtcgctctgacaggcttaatattgactattaagcttaattgtggtccgctatttatatcattgtattgcgtatctattttcgctggatttgcatacagcgttcctccaattcgttggaaaagatatcctttcaccaacttcttaataactatcagctcacacgtgggtgttaactttacatgttattacgcctccagagcagcctttggcttacccttcgaaatgtctccgccatttacttttattctcgcttttatgaccgtaatgggaatgacaatagctttcgcgaaagacatttcagatatcgaaggtgatgcgaaatatggggtgtctactgttgctacgaagttaggtgcaagaaatatgacgtttgttgtcagtggtgtcttgttgctgacatacgtaagcgctatacttgcagctatcatttggccgcaagcctttaagtcaaatgtgatgttgttatctcatgccatcctggcgttctgcctaattttccaaactagagagctagcgcttgcaaattatgcttctgcacctagtaggcagttttttgaatttatctggaaattgcattatgcagagtacttagtttatgttttcatc

SEQ ID NO: 364 - DNA, 2031 bp, Artificial Sequence
  Synthetic
atggcttcagaaaaagaaattaggagagagagattcttgaacgttttccctaaattagtagaggaattgaacgcatcgcttttggcttacggtatgcctaaggaagcatgtgactggtatgcccactcattgaactacaacactccaggcggtaagctaaatagaggtttgtccgttgtggacacgtatgctattctctccaacaagaccgttgaacaattggggcaagaagaatacgaaaaggttgccattctaggttggtgcattgagttgttgcaggcttactggttggtcgccgatgatatgatggacaagtccattaccagaagaggccaaccatgttggtacaaggttcctgaagttggggaaattgccatctgggacgcattcatgttagaggctgctatctacaagcttttgaaatctcacttcagaaacgaaaaatactacatagatatcaccgaattgttccatgaggtcaccttccaaaccgaattgggccaattgatggacttaatcactgcacctgaagacaaagtcgacttgagtaagttctccctaaagaagcactccttcatagttactttcaagactgcttactattctttctacttgcctgtcgcattggccatgtacgttgccggtatcacggatgaaaaggatttgaaacaagccagagatgtcttgattccattgggtgaatacttccaaattcaagatgactacttagactgcttcggtaccccagaacagatcggtaagatcggtacagatatccaagataacaaatgttcttgggtaatcaacaaggcattggaacttgcttccgcagaacaaagaaagactttagacgaaaattacggtaagaaggactcagtcgcagaagccaaatgcaaaaagattttcaatgacttgaaaattgaacagctataccacgaatatgaagagtctattgccaaggatttgaaggccaaaatttctcaggtcgatgagtctcgtggcttcaaagctgatgtcttaactgcgttcttgaacaaagtttacaagagaagcaaaggttctggatcagccgggagcgaccagatagaaggaagtcctcatcacgagtctgataactccattgcgacaaaaatcctgaatttcggtcatacgtgctggaagttacaaaggccctatgtcgtgaaaggtctaatttcgatagcttgtggcttgtttggtcgcgaactatttcataataccaaccttttatcttggtcattgatgctcaaggcattctcatccttaatggtaatcctttcttttaatttctttgctgccagtatgaatcaaatttacgatgttgatattgaccgaattaacaaaccagatttgccactcgttagtggagagatgagtatcgaaactgcatggatactatcgatcattgtcgctctgacaggcttaatattgactattaagcttaattgtggtccgctatttatatcattgtattgcgtatctattttcgctggatttgcatacagcgttcctccaattcgttggaaaagatatcctttcaccaacttcttaataactatcagctcacacgtgggtgttaactttacatgttattacgcctccagagcagcctttggcttacccttcgaaatgtctccgccatttacttttattctcgcttttatgaccgtaatgggaatgacaatagctttcgcgaaagacatttcagatatcgaaggtgatgcgaaatatggggtgtctactgttgctacgaagttaggtgcaagaaatatgacgtttgttgtcagtggtgtcttgttgctgacatacgtaagcgctatacttgcagctatcatttggccgcaagcctttaagtcaaatgtgatgttgttatctcatgccatcctggcgttctgcctaattttccaaactagagagctagcgcttgcaaattatgcttctgcacctagtaggcagttttttgaatttatctggaaattgcattatgcagagtacttagtttatgttttcatc

SEQ ID NO: 365 - DNA, 2031 bp, Artificial Sequence
  Synthetic
atggcttcagaaaaagaaattaggagagagagattcttgaacgttttccctaaattagtagaggaattgaacgcatcgcttttggcttacggtatgcctaaggaagcatgtgactggtatgcccactcattgaactacaacactccaggcggtaagctaaatagaggtttgtccgttgtggacacgtatgctattctctccaacaagaccgttgaacaattggggcaagaagaatacgaaaaggttgccattctaggttggtgcattgagttgttgcaggcttactggttggtcgccgatgatatgatggacaagtccattaccagaagaggccaaccatgttggtacaaggttcctgaagttggggaaattgccatctgggacgcattcatgttagaggctgctatctacaagcttttgaaatctcacttcagaaacgaaaaatactacatagatatcaccgaattgttccatgaggtcaccttccaaaccgaattgggccaattgatggacttaatcactgcacctgaagacaaagtcgacttgagtaagttctccctaaagaagcactccttcatagttactttcaagactgcttactattctttctacttgcctgtcgcattggccatgtacgttgccggtatcacggatgaaaaggatttgaaacaagccagagatgtcttgattccattgggtgaatacttccaaattcaagatgactacttagactgcttcggtaccccagaacagatcggtaagatcggtacagatatccaagataacaaatgttcttgggtaatcaacaaggcattggaacttgcttccgcagaacaaagaaagactttagacgaaaattacggtaagaaggactcagtcgcagaagccaaatgcaaaaagattttcaatgacttgaaaattgaacagctataccacgaatatgaagagtctattgccaaggatttgaaggccaaaatttctcaggtcgatgagtctcgtggcttcaaagctgatgtcttaactgcgttcttgaacaaagtttacaagagaagcaaaggttctggatccgcaggatcagatcaaatagaagggagcccccatcacgagtcggacaacagtatcgcgacaaaaattcttaattttggccatactttctggaagttacagcgtccttacgtagttaaaggtttgatttctatcgcttgcggtttgttcggtaaggaactactccacaatacgaacttgatatcatggtctttaatgtttaaagccttctttgctctggtcccaattctaagtttcaattttttcgcagcctccgtgaatcaaatctatgatgttgacatagataggattaacaagccggatttaccactcgtgtccggagaaatgtctatagagacagcttggatcctgtcgattattgtcgctcttactggcttgatagttaccattaaaatgaaaggtggccctttatttgtgtttatctatatatttggtctattcgcaggttttgcttactctgtacctccaattcgatggaagcagtatccgttcactaactttttgatcaccatttcaagccatgttggactagccttcacatcctactatgcttctagagccgcgcttggtctaccatttgaactgcgcccctcatttagttttataattgcattcatgacagttatggggatgactattgcctttgcaaaggacatttcagatattgaaggagatgcaaaatatggtgtcagaacggtagctactaaattaggtgctagaaatatgacccgggttgtgtcgggggtgttgctattaaattacttagtcagtattttggcaggaataatctggccccaagcttttaattcaaatgtcatgatcttatcgcacgcaattttggccttctgtctcatctttaggacgagagaattagcccttgctaactacgcaagtgctccttcccgtcaatttttcgagtttatttggaacctgtattatgcggaatacctggtatacgttttcatt

SEQ ID NO: 366 - DNA, 2031 bp, Artificial Sequence
  Synthetic
atggcttcagaaaaagaaattaggagagagagattcttgaacgttttccctaaattagtagaggaattgaacgcatcgcttttggcttacggtatgcctaaggaagcatgtgactggtatgcccactcattgaactacaacactccaggcggtaagctaaatagaggtttgtccgttgtggacacgtatgctattctctccaacaagaccgttgaacaattggggcaagaagaatacgaaaaggttgccattctaggttggtgcattgagttgttgcaggcttactggttggtcgccgatgatatgatggacaagtccattaccagaagaggccaaccatgttggtacaaggttcctgaagttggggaaattgccatctgggacgcattcatgttagaggctgctatctacaagcttttgaaatctcacttcagaaacgaaaaatactacatagatatcaccgaattgttccatgaggtcaccttccaaaccgaattgggccaattgatggacttaatcactgcacctgaagacaaagtcgacttgagtaagttctccctaaagaagcactccttcatagttactttcaagactgcttactattctttctacttgcctgtcgcattggccatgtacgttgccggtatcacggatgaaaaggatttgaaacaagccagagatgtcttgattccattgggtgaatacttccaaattcaagatgactacttagactgcttcggtaccccagaacagatcggtaagatcggtacagatatccaagataacaaatgttcttgggtaatcaacaaggcattggaacttgcttccgcagaacaaagaaagactttagacgaaaattacggtaagaaggactcagtcgcagaagccaaatgcaaaaagattttcaatgacttgaaaattgaacagctataccacgaatatgaagagtctattgccaaggatttgaaggccaaaatttctcaggtcgatgagtctcgtggcttcaaagctgatgtcttaactgcgttcttgaacaaagtttacaagagaagcaaaggttctggatccgcaggatcagatcaaatagaagggagcccccatcacgagtcggacaacagtatcgcgacaaaaattcttaattttggccatactttctggaagttacagcgtccttacgtagttaaaggtctgatttctatcgcttgcggtttgttcggtaaggaactactccacaatacgaacttgatatcatggtctttaatgtttaaagccttctttgctctggtcccaattctaagtttcaattttttcgcagccattgtgaatcaaatctatgatgttgaaatagataggattaacaagccggatttaccactcgtgtccggagaaatgtctatagagacagcttggatcctgtcgattattgtcgctcttactggcttgatagttaccattaaaatgaaaggtggccctttatttgtgtttatctatatatttggtctattcgcaggttttgcttactctgtacctccaattcgatggaagcagtatccgttcactaactttttgatcaccatttcaagccatgttggactagccttcacatcctactatgcttctagagccgcgcttggtctaccatttgaactgcgcccctcatttagttttataattgcattcatgacagttatggggatgactattgcctttgcaaaggacatttcagatattgaaggagatgcaaaatatggtgtcagaacggtagctactaaattaggtgctagaaatatgaccagggttgtgtcgggggtgttgctattaaattacttagtcagtattttggcaggaataatctggccccaagcttttaattcaaatgtcatgatcttatcgcacgcaattttggccttctgtctcatctttcggacgagagaattagcccttgctaactacgcaagtgctccttcccgtcaatttttcgagtttatttggagactgtattatgcggaatacctggtatacgttttcatt

SEQ ID NO: 367 - DNA, 2031 bp, Artificial Sequence
  Synthetic
atggcttcagaaaaagaaattaggagagagagattcttgaacgttttccctaaattagtagaggaattgaacgcatcgcttttggcttacggtatgcctaaggaagcatgtgactggtatgcccactcattgaactacaacactccaggcggtaagctaaatagaggtttgtccgttgtggacacgtatgctattctctccaacaagaccgttgaacaattggggcaagaagaatacgaaaaggttgccattctaggttggtgcattgagttgttgcaggcttactggttggtcgccgatgatatgatggacaagtccattaccagaagaggccaaccatgttggtacaaggttcctgaagttggggaaattgccatctgggacgcattcatgttagaggctgctatctacaagcttttgaaatctcacttcagaaacgaaaaatactacatagatatcaccgaattgttccatgaggtcaccttccaaaccgaattgggccaattgatggacttaatcactgcacctgaagacaaagtcgacttgagtaagttctccctaaagaagcactccttcatagttactttcaagactgcttactattctttctacttgcctgtcgcattggccatgtacgttgccggtatcacggatgaaaaggatttgaaacaagccagagatgtcttgattccattgggtgaatacttccaaattcaagatgactacttagactgcttcggtaccccagaacagatcggtaagatcggtacagatatccaagataacaaatgttcttgggtaatcaacaaggcattggaacttgcttccgcagaacaaagaaagactttagacgaaaattacggtaagaaggactcagtcgcagaagccaaatgcaaaaagattttcaatgacttgaaaattgaacagctataccacgaatatgaagagtctattgccaaggatttgaaggccaaaatttctcaggtcgatgagtctcgtggcttcaaagctgatgtcttaactgcgttcttgaacaaagtttacaagagaagcaaaggttctggatcagccgggagcgaccagatagaaggaagtcctcatcacgagtctgataactccattgcgacaaaaatcctgaatttcggtcatacgtgctggaagttacaaaggccctatgtcgtgaaaggtatgatttcgatagcttgtggcttgtttggtcgcgaactatttcataataccaaccttttatcttggtcattgatgctcaaggcattctcatccttaatggtaatcctttcttttaatttctttgctgcctcgatgaatcaaatttacgatgttgatattgaccgaattaacaaaccagatttgccactcgttagtggagagatgagtatcgaaactgcatggatactatcgatcattgtcgctctgacaggcttaatattgactattaagcttaattgtggtccgctatttatatcattgtattgcgtatctattttcgctggatttgcatacagcgttcctccaattcgttggaaacagtatcctttcaccaacttcttaataactatcagctcacacgtgggtgttaactttacatgttattacgcctccagagcagcctttggcttacccttcgaaatgtctccgccatttacttttattctcgcttttatgaccgtaatgggaatgacaatagctttcgcgaaagacatttcagatatcgaaggtgatgcgaaatatggggtgtctactgttgctacgaagttaggtgcaagaaatatgacgtttgttgtcagtggtgtcttgttgctgacatacgtaagcgctatacttgcagctatcatttggccgcaagcctttaagtcaaatgtgatgttgttatctcatgccatcctggcgttctgcctaattttcagaactagagagctagcgcttgcaaattatgcttctgcacctagtaggcagttttttgaatttatctggaaattgcattatgcagagtacttagtttatgttttcatc

SEQ ID NO: 368 - DNA, 2031 bp, Artificial Sequence
  Synthetic
atggcttcagaaaaagaaattaggagagagagattcttgaacgttttccctaaattagtagaggaattgaacgcatcgcttttggcttacggtatgcctaaggaagcatgtgactggtatgcccactcattgaactacaacactccaggcggtaagctaaatagaggtttgtccgttgtggacacgtatgctattctctccaacaagaccgttgaacaattggggcaagaagaatacgaaaaggttgccattctaggttggtgcattgagttgttgcaggcttactggttggtcgccgatgatatgatggacaagtccattaccagaagaggccaaccatgttggtacaaggttcctgaagttggggaaattgccatctgggacgcattcatgttagaggctgctatctacaagcttttgaaatctcacttcagaaacgaaaaatactacatagatatcaccgaattgttccatgaggtcaccttccaaaccgaattgggccaattgatggacttaatcactgcacctgaagacaaagtcgacttgagtaagttctccctaaagaagcactccttcatagttactttcaagactgcttactattctttctacttgcctgtcgcattggccatgtacgttgccggtatcacggatgaaaaggatttgaaacaagccagagatgtcttgattccattgggtgaatacttccaaattcaagatgactacttagactgcttcggtaccccagaacagatcggtaagatcggtacagatatccaagataacaaatgttcttgggtaatcaacaaggcattggaacttgcttccgcagaacaaagaaagactttagacgaaaattacggtaagaaggactcagtcgcagaagccaaatgcaaaaagattttcaatgacttgaaaattgaacagctataccacgaatatgaagagtctattgccaaggatttgaaggccaaaatttctcaggtcgatgagtctcgtggcttcaaagctgatgtcttaactgcgttcttgaacaaagtttacaagagaagcaaaggttctggatcagccgggagcgaccagatagaaggaagtcctcatcacgagtctgataactccattgcgacaaaaatcctgaatttcggtcatacgtgctggaagttacaaaggccctatgtcgtgaaaggtcttatttcgatagcttgtggcttgtttggtcgcgaactatttcataataccaaccttttatcttggtcattgatgctcaaggcattctcatccttaatggtaatcctttcttttaatttctttgctgcctccatgaatcaaatttacgatgttgatattgaccgaattaacaaaccagatttgccactcgttagtggagagatgagtatcgaaactgcatggatactatcgatcattgtcgctctgacaggcttaatattgactattaagcttaattgtggtccgctatttatatcattgtattgcgtatctattttcgctggatttgcatacagcgttcctccaattcgttggaaacagtatcctttcaccaacttcttaataactatcagctcacacgtgggtgttaactttacatgttattacgcctccagagcagcctttggcttacccttcgaaatgtctccgccatttacttttattctcgcttttatgaccgtaatgggaatgacaatagctttcgcgaaagacatttcagatatcgaaggtgatgcgaaatatggggtgtctactgttgctacgaagttaggtgcaagaaatatgacgtttgttgtcagtggtgtcttgttgctgacatacgtaagcgctatacttgcagctatcatttggccgcaagcctttaagtcaaatgtgatgttgttatctcatgccatcctggcgttctgcctaattttcagaactagagagctagcgcttgcaaattatgcttctgcacctagtaggcagttttttgaatttatctggaaattgcattatgcagagtacttagtttatgttttcatc

SEQ ID NO: 369 - DNA, 2031 bp, Artificial Sequence
  Synthetic
atggcttcagaaaaagaaattaggagagagagattcttgaacgttttccctaaattagtagaggaattgaacgcatcgcttttggcttacggtatgcctaaggaagcatgtgactggtatgcccactcattgaactacaacactccaggcggtaagctaaatagaggtttgtccgttgtggacacgtatgctattctctccaacaagaccgttgaacaattggggcaagaagaatacgaaaaggttgccattctaggttggtgcattgagttgttgcaggcttactggttggtcgccgatgatatgatggacaagtccattaccagaagaggccaaccatgttggtacaaggttcctgaagttggggaaattgccatctgggacgcattcatgttagaggctgctatctacaagcttttgaaatctcacttcagaaacgaaaaatactacatagatatcaccgaattgttccatgaggtcaccttccaaaccgaattgggccaattgatggacttaatcactgcacctgaagacaaagtcgacttgagtaagttctccctaaagaagcactccttcatagttactttcaagactgcttactattctttctacttgcctgtcgcattggccatgtacgttgccggtatcacggatgaaaaggatttgaaacaagccagagatgtcttgattccattgggtgaatacttccaaattcaagatgactacttagactgcttcggtaccccagaacagatcggtaagatcggtacagatatccaagataacaaatgttcttgggtaatcaacaaggcattggaacttgcttccgcagaacaaagaaagactttagacgaaaattacggtaagaaggactcagtcgcagaagccaaatgcaaaaagattttcaatgacttgaaaattgaacagctataccacgaatatgaagagtctattgccaaggatttgaaggccaaaatttctcaggtcgatgagtctcgtggcttcaaagctgatgtcttaactgcgttcttgaacaaagtttacaagagaagcaaaggttctggatccgcaggatcagatcaaatagaagggagcccccatcacgagtcggacaacagtatcgcgacaaaaattcttaattttggccatactttctggaagttacagcgtccttacgtagttaaaggtctaatttctatcgcttgcggtttgttcggtaaggaactactccacaatacgaacttgatatcatggtctttaatgtttaaagccttctttgctctggtcccaattctaagtttcaattttttcgcagcctccgtgaatcaaatctatgatgttgagatagataggattaacaagccggatttaccactcgtgtccggagaaatgtctatagagacagcttggatcctgtcgattattgtcgctcttactggcttgatagttaccattaaaatgaaaggtggccctttatttgtgtttatctatatatttggtttattcgcaggttttgcttactctgtacctccaattcgatggaagcagtatccgttcactaactttttgatcaccatttcaagccatgttggactagccttcacatcctactatgcttctagagccgcgcttggtctaccatttgaactgcgcccctcatttagttttataattgcattcatgacagttatggggatgactattgcctttgcaaaggacatttcagatattgaaggagatgcaaaatatggtgtcagaacggtagctactaaattaggtgctagaaatatgaccagggttgtgtcgggggtgttgctattaaattacttagtcagtattttggcaggaataatctggccccaagcttttaattcaaatgtcatgatcttatcgcacgcaattttggccttctgtctcatctttcaaacgagagaattagcccttgctaactacgcaagtgctccttcccgtcaatttttcgagtttatttggagactgtattatgcggaatacctggtatacgttttcatt

SEQ ID NO: 370 - DNA, 2031 bp, Artificial Sequence
  Synthetic
atggcttcagaaaaagaaattaggagagagagattcttgaacgttttccctaaattagtagaggaattgaacgcatcgcttttggcttacggtatgcctaaggaagcatgtgactggtatgcccactcattgaactacaacactccaggcggtaagctaaatagaggtttgtccgttgtggacacgtatgctattctctccaacaagaccgttgaacaattggggcaagaagaatacgaaaaggttgccattctaggttggtgcattgagttgttgcaggcttactggttggtcgccgatgatatgatggacaagtccattaccagaagaggccaaccatgttggtacaaggttcctgaagttggggaaattgccatctgggacgcattcatgttagaggctgctatctacaagcttttgaaatctcacttcagaaacgaaaaatactacatagatatcaccgaattgttccatgaggtcaccttccaaaccgaattgggccaattgatggacttaatcactgcacctgaagacaaagtcgacttgagtaagttctccctaaagaagcactccttcatagttactttcaagactgcttactattctttctacttgcctgtcgcattggccatgtacgttgccggtatcacggatgaaaaggatttgaaacaagccagagatgtcttgattccattgggtgaatacttccaaattcaagatgactacttagactgcttcggtaccccagaacagatcggtaagatcggtacagatatccaagataacaaatgttcttgggtaatcaacaaggcattggaacttgcttccgcagaacaaagaaagactttagacgaaaattacggtaagaaggactcagtcgcagaagccaaatgcaaaaagattttcaatgacttgaaaattgaacagctataccacgaatatgaagagtctattgccaaggatttgaaggccaaaatttctcaggtcgatgagtctcgtggcttcaaagctgatgtcttaactgcgttcttgaacaaagtttacaagagaagcaaaggttctggatccgcaggatcagatcaaatagaagggagcccccatcacgagtcggacaacagtatcgcgacaaaaattcttaattttggccatactttctggaagttacagcgtccttacgtagttaaaggtatgatttctatcgcttgcggtttgttcggtaaggaactactccacaatacgaacttgatatcatggtctttaatgtttaaagccttctttgctctggtcccaattctaagtttcaattttttcgcagccgttgtgaatcaaatctatgatgttgagatagataggattaacaagccggatttaccactcgtgtccggagaaatgtctatagagacagcttggatcctgtcgattattgtcgctcttactggcttgatagttaccattaaaatgaaaggtggccctttatttgtgtttatctatatatttggtttattcgcaggttttgcttactctgtacctccaattcgatggaagcagtatccgttcactaactttttgatcaccatttcaagccatgttggactagccttcacatcctactatgcttctagagccgcgcttggtctaccatttgaactgcgcccctcatttagttttataattgcattcatgacagttatggggatgactattgcctttgcaaaggacatttcagatattgaaggagatgcaaaatatggtgtccggacggtagctactaaattaggtgctagaaatatgaccagagttgtgtcgggggtgttgctattaaattacttagtcagtattttggcaggaataatctggccccaagcttttaattcaaatgtcatgatcttatcgcacgcaattttggccttctgtctcatctttagaacgagagaattagcccttgctaactacgcaagtgctccttcccgtcaatttttcgagtttatttggaatctgtattatgcggaatacctggtatacgttttcatt

SEQ ID NO: 371 - DNA, 2031 bp, Artificial Sequence
  Synthetic
atggcttcagaaaaagaaattaggagagagagattcttgaacgttttccctaaattagtagaggaattgaacgcatcgcttttggcttacggtatgcctaaggaagcatgtgactggtatgcccactcattgaactacaacactccaggcggtaagctaaatagaggtttgtccgttgtggacacgtatgctattctctccaacaagaccgttgaacaattggggcaagaagaatacgaaaaggttgccattctaggttggtgcattgagttgttgcaggcttactggttggtcgccgatgatatgatggacaagtccattaccagaagaggccaaccatgttggtacaaggttcctgaagttggggaaattgccatctgggacgcattcatgttagaggctgctatctacaagcttttgaaatctcacttcagaaacgaaaaatactacatagatatcaccgaattgttccatgaggtcaccttccaaaccgaattgggccaattgatggacttaatcactgcacctgaagacaaagtcgacttgagtaagttctccctaaagaagcactccttcatagttactttcaagactgcttactattctttctacttgcctgtcgcattggccatgtacgttgccggtatcacggatgaaaaggatttgaaacaagccagagatgtcttgattccattgggtgaatacttccaaattcaagatgactacttagactgcttcggtaccccagaacagatcggtaagatcggtacagatatccaagataacaaatgttcttgggtaatcaacaaggcattggaacttgcttccgcagaacaaagaaagactttagacgaaaattacggtaagaaggactcagtcgcagaagccaaatgcaaaaagattttcaatgacttgaaaattgaacagctataccacgaatatgaagagtctattgccaaggatttgaaggccaaaatttctcaggtcgatgagtctcgtggcttcaaagctgatgtcttaactgcgttcttgaacaaagtttacaagagaagcaaaggttctggatcagccgggagcgaccagatagaaggaagtcctcatcacgagtctgataactccattgcgacaaaaatcctgaatttcggtcatacgtgctggaagttacaaaggccctatgtcgtgaaaggtcttatttcgatagcttgtggcttgtttggtcgcgaactatttcataataccaaccttttatcttggtcattgatgctcaaggcattctcatccttaatggtaatcctttcttttaatttctttgctgccataatgaatcaaatttacgatgttgatattgaccgaattaacaaaccagatttgccactcgttagtggagagatgagtatcgaaactgcatggatactatcgatcattgtcgctctgacaggcttaatattgactattaagcttaattgtggtccgctatttatatcattgtattgcgtatctttattcgctggatttgcatacagcgttcctccaattcgttggaaacagtatcctttcaccaacttcttaataactatcagctcacacgtgggtgttaactttacatgttattacgcctccagagcagcctttggcttacccttcgaaatgtctccgccatttacttttattctcgcttttatgaccgtaatgggaatgacaatagctttcgcgaaagacatttcagatatcgaaggtgatgcgaaatatggggtgtctactgttgctacgaagttaggtgcaagaaatatgacgtttgttgtcagtggtgtcttgttgctgacatacgtaagcgctatacttgcagctatcatttggccgcaagcctttaagtcaaatgtgatgttgttatctcatgccatcctggcgttctgcctaattttccaaactagagagctagcgcttgcaaattatgcttctgcacctagtaggcagttttttgaatttatctggaaattgcattatgcagagtacttagtttatgttttcatc

SEQ ID NO: 372 - DNA, 2031 bp, Artificial Sequence
  Synthetic
atggcttcagaaaaagaaattaggagagagagattcttgaacgttttccctaaattagtagaggaattgaacgcatcgcttttggcttacggtatgcctaaggaagcatgtgactggtatgcccactcattgaactacaacactccaggcggtaagctaaatagaggtttgtccgttgtggacacgtatgctattctctccaacaagaccgttgaacaattggggcaagaagaatacgaaaaggttgccattctaggttggtgcattgagttgttgcaggcttactggttggtcgccgatgatatgatggacaagtccattaccagaagaggccaaccatgttggtacaaggttcctgaagttggggaaattgccatctgggacgcattcatgttagaggctgctatctacaagcttttgaaatctcacttcagaaacgaaaaatactacatagatatcaccgaattgttccatgaggtcaccttccaaaccgaattgggccaattgatggacttaatcactgcacctgaagacaaagtcgacttgagtaagttctccctaaagaagcactccttcatagttactttcaagactgcttactattctttctacttgcctgtcgcattggccatgtacgttgccggtatcacggatgaaaaggatttgaaacaagccagagatgtcttgattccattgggtgaatacttccaaattcaagatgactacttagactgcttcggtaccccagaacagatcggtaagatcggtacagatatccaagataacaaatgttcttgggtaatcaacaaggcattggaacttgcttccgcagaacaaagaaagactttagacgaaaattacggtaagaaggactcagtcgcagaagccaaatgcaaaaagattttcaatgacttgaaaattgaacagctataccacgaatatgaagagtctattgccaaggatttgaaggccaaaatttctcaggtcgatgagtctcgtggcttcaaagctgatgtcttaactgcgttcttgaacaaagtttacaagagaagcaaaggttctggatcagccgggagcgaccagatagaaggaagtcctcatcacgagtctgataactccattgcgacaaaaatcctgaatttcggtcatacgtgctggaagttacaaaggccctatgtcgtgaaaggtatgatttcgatagcttgtggcttgtttggtcgcgaactatttcataataccaaccttttatcttggtcattgatgctcaaggcattctcatccttaatggtaatcctttcttttaatttctttgctgccgttatgaatcaaatttacgatgttgatattgaccgaattaacaaaccagatttgccactcgttagtggagagatgagtatcgaaactgcatggatactatcgatcattgtcgctctgacaggcttaatattgactattaagcttaattgtggtccgctatttatatcattgtattgcgtatctctattcgctggatttgcatacagcgttcctccaattcgttggaaacagtatcctttcaccaacttcttaataactatcagctcacacgtgggtgttaactttacatgttattacgcctccagagcagcctttggcttacccttcgaaatgtctccgccatttacttttattctcgcttttatgaccgtaatgggaatgacaatagctttcgcgaaagacatttcagatatcgaaggtgatgcgaaatatggggtgagaactgttgctacgaagttaggtgcaagaaatatgacgtttgttgtcagtggtgtcttgttgctgacatacgtaagcgctatacttgcagctatcatttggccgcaagcctttaagtcaaatgtgatgttgttatctcatgccatcctggcgttctgcctaattttccaaactagagagctagcgcttgcaaattatgcttctgcacctagtaggcagttttttgaatttatctggaaattgcattatgcagagtacttagtttatgttttcatc

SEQ ID NO: 373 - DNA, 2031 bp, Artificial Sequence
  Synthetic
atggcttcagaaaaagaaattaggagagagagattcttgaacgttttccctaaattagtagaggaattgaacgcatcgcttttggcttacggtatgcctaaggaagcatgtgactggtatgcccactcattgaactacaacactccaggcggtaagctaaatagaggtttgtccgttgtggacacgtatgctattctctccaacaagaccgttgaacaattggggcaagaagaatacgaaaaggttgccattctaggttggtgcattgagttgttgcaggcttactggttggtcgccgatgatatgatggacaagtccattaccagaagaggccaaccatgttggtacaaggttcctgaagttggggaaattgccatctgggacgcattcatgttagaggctgctatctacaagcttttgaaatctcacttcagaaacgaaaaatactacatagatatcaccgaattgttccatgaggtcaccttccaaaccgaattgggccaattgatggacttaatcactgcacctgaagacaaagtcgacttgagtaagttctccctaaagaagcactccttcatagttactttcaagactgcttactattctttctacttgcctgtcgcattggccatgtacgttgccggtatcacggatgaaaaggatttgaaacaagccagagatgtcttgattccattgggtgaatacttccaaattcaagatgactacttagactgcttcggtaccccagaacagatcggtaagatcggtacagatatccaagataacaaatgttcttgggtaatcaacaaggcattggaacttgcttccgcagaacaaagaaagactttagacgaaaattacggtaagaaggactcagtcgcagaagccaaatgcaaaaagattttcaatgacttgaaaattgaacagctataccacgaatatgaagagtctattgccaaggatttgaaggccaaaatttctcaggtcgatgagtctcgtggcttcaaagctgatgtcttaactgcgttcttgaacaaagtttacaagagaagcaaaggttctggatccgcaggatcagatcaaatagaagggagcccccatcacgagtcggacaacagtatcgcgacaaaaattcttaattttggccatactttctggaagttacagcgtccttacgtagttaaaggtctgatttctatcgcttgcggtttgttcggtaaggaactactccacaatacgaacttgatatcatggtctttaatgtttaaagccttctttgctctggtcccaattctaagtttcaattttttcgcagcctcagtgaatcaaatctatgatgttgaaatagataggattaacaagccggatttaccactcgtgtccggagaaatgtctatagagacagcttggatcctgtcgattattgtcgctcttactggcttgatagttaccattaaaatgaaaggtggccctttatttgtgtttatctatatatttggtttgttcgcaggttttgcttactctgtacctccaattcgatggaagcagtatccgttcactaactttttgatcaccatttcaagccatgttggactagccttcacatcctactatgcttctagagccgcgcttggtctaccatttgaactgcgcccctcatttagttttataattgcattcatgacagttatggggatgactattgcctttgcaaaggacatttcagatattgaaggagatgcaaaatatggtgtccggacggtagctactaaattaggtgctagaaatatgaccagagttgtgtcgggggtgttgctattaaattacttagtcagtattttggcaggaataatctggccccaagcttttaattcaaatgtcatgatcttatcgcacgcaattttggccttctgtctcatctttaggacgagagaattagcccttgctaactacgcaagtgctccttcccgtcaatttttcgagtttatttggttgctgtattatgcggaatacctggtatacgttttcatt

SEQ ID NO: 374 - DNA, 2031 bp, Artificial Sequence
  Synthetic
atggcttcagaaaaagaaattaggagagagagattcttgaacgttttccctaaattagtagaggaattgaacgcatcgcttttggcttacggtatgcctaaggaagcatgtgactggtatgcccactcattgaactacaacactccaggcggtaagctaaatagaggtttgtccgttgtggacacgtatgctattctctccaacaagaccgttgaacaattggggcaagaagaatacgaaaaggttgccattctaggttggtgcattgagttgttgcaggcttactggttggtcgccgatgatatgatggacaagtccattaccagaagaggccaaccatgttggtacaaggttcctgaagttggggaaattgccatctgggacgcattcatgttagaggctgctatctacaagcttttgaaatctcacttcagaaacgaaaaatactacatagatatcaccgaattgttccatgaggtcaccttccaaaccgaattgggccaattgatggacttaatcactgcacctgaagacaaagtcgacttgagtaagttctccctaaagaagcactccttcatagttactttcaagactgcttactattctttctacttgcctgtcgcattggccatgtacgttgccggtatcacggatgaaaaggatttgaaacaagccagagatgtcttgattccattgggtgaatacttccaaattcaagatgactacttagactgcttcggtaccccagaacagatcggtaagatcggtacagatatccaagataacaaatgttcttgggtaatcaacaaggcattggaacttgcttccgcagaacaaagaaagactttagacgaaaattacggtaagaaggactcagtcgcagaagccaaatgcaaaaagattttcaatgacttgaaaattgaacagctataccacgaatatgaagagtctattgccaaggatttgaaggccaaaatttctcaggtcgatgagtctcgtggcttcaaagctgatgtcttaactgcgttcttgaacaaagtttacaagagaagcaaaggttctggatccgcaggatcagatcaaatagaagggagcccccatcacgagtcggacaacagtatcgcgacaaaaattcttaattttggccatactttctggaagttacagcgtccttacgtagttaaaggtctaatttctatcgcttgcggtttgttcggtaaggaactactccacaatacgaacttgatatcatggtctttaatgtttaaagccttctttgctctggtcccaattctaagtttcaattttttcgcagccgtggttaatcaaatctatgatgttgaaatagataggattaacaagccggatttaccactcgtgtccggagaaatgtctatagagacagcttggatcctgtcgattattgtcgctcttactggcttgatagttaccattaaaatgaaaggtggccctttatttgtgtttatctatatatttggtttgttcgcaggttttgcttactctgtacctccaattcgatggaagcagtatccgttcactaactttttgatcaccatttcaagccatgttggactagccttcacatcctactatgcttctagagccgcgcttggtctaccatttgaactgcgcccctcatttagttttataattgcattcatgacagttatggggatgactattgcctttgcaaaggacatttcagatattgaaggagatgcaaaatatggtgtcagaacggtagctactaaattaggtgctagaaatatgaccagggttgtgtcgggggtgttgctattaaattacttagtcagtattttggcaggaataatctggccccaagcttttaattcaaatgtcatgatcttatcgcacgcaattttggccttctgtctcatctttcaaacgagagaattagcccttgctaactacgcaagtgctccttcccgtcaatttttcgagtttatttggaacctgtattatgcggaatacctggtatacgttttcatt

SEQ ID NO: 375 - DNA, 2031 bp, Artificial Sequence
  Synthetic
atggcttcagaaaaagaaattaggagagagagattcttgaacgttttccctaaattagtagaggaattgaacgcatcgcttttggcttacggtatgcctaaggaagcatgtgactggtatgcccactcattgaactacaacactccaggcggtaagctaaatagaggtttgtccgttgtggacacgtatgctattctctccaacaagaccgttgaacaattggggcaagaagaatacgaaaaggttgccattctaggttggtgcattgagttgttgcaggcttactggttggtcgccgatgatatgatggacaagtccattaccagaagaggccaaccatgttggtacaaggttcctgaagttggggaaattgccatctgggacgcattcatgttagaggctgctatctacaagcttttgaaatctcacttcagaaacgaaaaatactacatagatatcaccgaattgttccatgaggtcaccttccaaaccgaattgggccaattgatggacttaatcactgcacctgaagacaaagtcgacttgagtaagttctccctaaagaagcactccttcatagttactttcaagactgcttactattctttctacttgcctgtcgcattggccatgtacgttgccggtatcacggatgaaaaggatttgaaacaagccagagatgtcttgattccattgggtgaatacttccaaattcaagatgactacttagactgcttcggtaccccagaacagatcggtaagatcggtacagatatccaagataacaaatgttcttgggtaatcaacaaggcattggaacttgcttccgcagaacaaagaaagactttagacgaaaattacggtaagaaggactcagtcgcagaagccaaatgcaaaaagattttcaatgacttgaaaattgaacagctataccacgaatatgaagagtctattgccaaggatttgaaggccaaaatttctcaggtcgatgagtctcgtggcttcaaagctgatgtcttaactgcgttcttgaacaaagtttacaagagaagcaaaggttctggatcagccgggagcgaccagatagaaggaagtcctcatcacgagtctgataactccattgcgacaaaaatcctgaatttcggtcatacgtgctggaagttacaaaggccctatgtcgtgaaaggtatgatttcgatagcttgtggcttgtttggtcgcgaactatttcataataccaaccttttatcttggtcattgatgctcaaggcattctcatccttaatggtaatcctttcttttaatttctttgctgccgttatgaatcaaatttacgatgttgatattgaccgaattaacaaaccagatttgccactcgttagtggagagatgagtatcgaaactgcatggatactatcgatcattgtcgctctgacaggcttaatattgactattaagcttaattgtggtccgctatttatatcattgtattgcgtatctttattcgctggatttgcatacagcgttcctccaattcgttggaaacggtatcctttcaccaacttcttaataactatcagctcacacgtgggtgttaactttacatgttattacgcctccagagcagcctttggcttacccttcgaaatgtctccgccatttacttttattctcgcttttatgaccgtaatgggaatgacaatagctttcgcgaaagacatttcagatatcgaaggtgatgcgaaatatggggtgtctactgttgctacgaagttaggtgcaagaaatatgacgtttgttgtcagtggtgtcttgttgctgacatacgtaagcgctatacttgcagctatcatttggccgcaagcctttaagtcaaatgtgatgttgttatctcatgccatcctggcgttctgcctaattttccaaactagagagctagcgcttgcaaattatgcttctgcacctagtaggcagttttttgaatttatctggaaattgcattatgcagagtacttagtttatgttttcatc

SEQ ID NO: 376 - DNA, 2031 bp, Artificial Sequence
  Synthetic
atggcttcagaaaaagaaattaggagagagagattcttgaacgttttccctaaattagtagaggaattgaacgcatcgcttttggcttacggtatgcctaaggaagcatgtgactggtatgcccactcattgaactacaacactccaggcggtaagctaaatagaggtttgtccgttgtggacacgtatgctattctctccaacaagaccgttgaacaattggggcaagaagaatacgaaaaggttgccattctaggttggtgcattgagttgttgcaggcttactggttggtcgccgatgatatgatggacaagtccattaccagaagaggccaaccatgttggtacaaggttcctgaagttggggaaattgccatctgggacgcattcatgttagaggctgctatctacaagcttttgaaatctcacttcagaaacgaaaaatactacatagatatcaccgaattgttccatgaggtcaccttccaaaccgaattgggccaattgatggacttaatcactgcacctgaagacaaagtcgacttgagtaagttctccctaaagaagcactccttcatagttactttcaagactgcttactattctttctacttgcctgtcgcattggccatgtacgttgccggtatcacggatgaaaaggatttgaaacaagccagagatgtcttgattccattgggtgaatacttccaaattcaagatgactacttagactgcttcggtaccccagaacagatcggtaagatcggtacagatatccaagataacaaatgttcttgggtaatcaacaaggcattggaacttgcttccgcagaacaaagaaagactttagacgaaaattacggtaagaaggactcagtcgcagaagccaaatgcaaaaagattttcaatgacttgaaaattgaacagctataccacgaatatgaagagtctattgccaaggatttgaaggccaaaatttctcaggtcgatgagtctcgtggcttcaaagctgatgtcttaactgcgttcttgaacaaagtttacaagagaagcaaaggttctggatcagccgggagcgaccagatagaaggaagtcctcatcacgagtctgataactccattgcgacaaaaatcctgaatttcggtcatacgtgctggaagttacaaaggccctatgtcgtgaaaggtttgatttcgatagcttgtggcttgtttggtcgcgaactatttcataataccaaccttttatcttggtcattgatgctcaaggcattctcatccttaatggtaatcctttcttttaatttctttgctgccataatgaatcaaatttacgatgttgatattgaccgaattaacaaaccagatttgccactcgttagtggagagatgagtatcgaaactgcatggatactatcgatcattgtcgctctgacaggcttaatattgactattaagcttaattgtggtccgctatttatatcattgtattgcgtatctattttcgctggatttgcatacagcgttcctccaattcgttggaaacagtatcctttcaccaacttcttaataactatcagctcacacgtgggtgttaactttacatgttattacgcctccagagcagcctttggcttacccttcgaaatgtctccgccatttacttttattctcgcttttatgaccgtaatgggaatgacaatagctttcgcgaaagacatttcagatatcgaaggtgatgcgaaatatggggtgagaactgttgctacgaagttaggtgcaagaaatatgacgtttgttgtcagtggtgtcttgttgctgacatacgtaagcgctatacttgcagctatcatttggccgcaagcctttaagtcaaatgtgatgttgttatctcatgccatcctggcgttctgcctaattttccaaactagagagctagcgcttgcaaattatgcttctgcacctagtaggcagttttttgaatttatctggaaattgcattatgcagagtacttagtttatgttttcatc

SEQ ID NO: 377 - DNA, 2031 bp, Artificial Sequence
  Synthetic
atggcttcagaaaaagaaattaggagagagagattcttgaacgttttccctaaattagtagaggaattgaacgcatcgcttttggcttacggtatgcctaaggaagcatgtgactggtatgcccactcattgaactacaacactccaggcggtaagctaaatagaggtttgtccgttgtggacacgtatgctattctctccaacaagaccgttgaacaattggggcaagaagaatacgaaaaggttgccattctaggttggtgcattgagttgttgcaggcttactggttggtcgccgatgatatgatggacaagtccattaccagaagaggccaaccatgttggtacaaggttcctgaagttggggaaattgccatctgggacgcattcatgttagaggctgctatctacaagcttttgaaatctcacttcagaaacgaaaaatactacatagatatcaccgaattgttccatgaggtcaccttccaaaccgaattgggccaattgatggacttaatcactgcacctgaagacaaagtcgacttgagtaagttctccctaaagaagcactccttcatagttactttcaagactgcttactattctttctacttgcctgtcgcattggccatgtacgttgccggtatcacggatgaaaaggatttgaaacaagccagagatgtcttgattccattgggtgaatacttccaaattcaagatgactacttagactgcttcggtaccccagaacagatcggtaagatcggtacagatatccaagataacaaatgttcttgggtaatcaacaaggcattggaacttgcttccgcagaacaaagaaagactttagacgaaaattacggtaagaaggactcagtcgcagaagccaaatgcaaaaagattttcaatgacttgaaaattgaacagctataccacgaatatgaagagtctattgccaaggatttgaaggccaaaatttctcaggtcgatgagtctcgtggcttcaaagctgatgtcttaactgcgttcttgaacaaagtttacaagagaagcaaaggttctggatccgcaggatcagatcaaatagaagggagcccccatcacgagtcggacaacagtatcgcgacaaaaattcttaattttggccatacttgttggaagttacagcgtccttacgtagttaaaggtctgatttctatcgcttgcggtttgttcggtaaggaactactccacaatacgaacttgatatcatggtctttaatgtttaaagccttctttgctctggtcccaattctaagtttcaattttttcgcagccagcgttaatcaaatctatgatgttgagatagataggattaacaagccggatttaccactcgtgtccggagaaatgtctatagagacagcttggatcctgtcgattattgtcgctcttactggcttgatagttaccattaaaatgaaaggtggccctttatttgtgtttatctatatatttggtttgttcgcaggttttgcttactctgtacctccaattcgatggaagcagtatccgttcactaactttttgatcaccatttcaagccatgttggactagccttcacatcctactatgcttctagagccgcgcttggtctaccatttgaactgcgcccctcatttagttttataattgcattcatgacagttatggggatgactattgcctttgcaaaggacatttcagatattgaaggagatgcaaaatatggtgtcagaacggtagctactaaattaggtgctagaaatatgaccagggttgtgtcgggggtgttgctattaaattacttagtcagtattttggcaggaataatctggccccaagcttttaattcaaatgtcatgatcttatcgcacgcaattttggccttctgtctcatctttaggacgagagaattagcccttgctaactacgcaagtgctccttcccgtcaatttttcgagtttatttggcgtctgtattatgcggaatacctggtatacgttttcatt

SEQ ID NO: 378 - DNA, 2031 bp, Artificial Sequence
  Synthetic
atggcttcagaaaaagaaattaggagagagagattcttgaacgttttccctaaattagtagaggaattgaacgcatcgcttttggcttacggtatgcctaaggaagcatgtgactggtatgcccactcattgaactacaacactccaggcggtaagctaaatagaggtttgtccgttgtggacacgtatgctattctctccaacaagaccgttgaacaattggggcaagaagaatacgaaaaggttgccattctaggttggtgcattgagttgttgcaggcttactggttggtcgccgatgatatgatggacaagtccattaccagaagaggccaaccatgttggtacaaggttcctgaagttggggaaattgccatctgggacgcattcatgttagaggctgctatctacaagcttttgaaatctcacttcagaaacgaaaaatactacatagatatcaccgaattgttccatgaggtcaccttccaaaccgaattgggccaattgatggacttaatcactgcacctgaagacaaagtcgacttgagtaagttctccctaaagaagcactccttcatagttactttcaagactgcttactattctttctacttgcctgtcgcattggccatgtacgttgccggtatcacggatgaaaaggatttgaaacaagccagagatgtcttgattccattgggtgaatacttccaaattcaagatgactacttagactgcttcggtaccccagaacagatcggtaagatcggtacagatatccaagataacaaatgttcttgggtaatcaacaaggcattggaacttgcttccgcagaacaaagaaagactttagacgaaaattacggtaagaaggactcagtcgcagaagccaaatgcaaaaagattttcaatgacttgaaaattgaacagctataccacgaatatgaagagtctattgccaaggatttgaaggccaaaatttctcaggtcgatgagtctcgtggcttcaaagctgatgtcttaactgcgttcttgaacaaagtttacaagagaagcaaaggttctggatcagccgggagcgaccagatagaaggaagtcctcatcacgagtctgataactccattgcgacaaaaatcctgaatttcggtcatacgtgctggaagttacaaaggccctatgtcgtgaaaggtctaatttcgatagcttgtggcttgtttggtcgcgaactatttcataataccaaccttttatcttggtcattgatgctcaaggcattctcatccttaatggtaatcctttcttttaatttctttgctgccataatgaatcaaatttacgatgttgatattgaccgaattaacaaaccagatttgccactcgttagtggagagatgagtatcgaaactgcatggatactatcgatcattgtcgctctgacaggcttaatattgactattaagcttaattgtggtccgctatttatatcattgtattgcgtatctattttcgctggatttgcatacagcgttcctccaattcgttggaaaagatatcctttcaccaacttcttaataactatcagctcacacgtgggtgttaactttacatgttattacgcctccagagcagcctttggcttacccttcgaaatgtctccgccatttacttttattctcgcttttatgaccgtaatgggaatgacaatagctttcgcgaaagacatttcagatatcgaaggtgatgcgaaatatggggtgtctactgttgctacgaagttaggtgcaagaaatatgacgtttgttgtcagtggtgtcttgttgctgacatacgtaagcgctatacttgcagctatcatttggccgcaagcctttaagtcaaatgtgatgttgttatctcatgccatcctggcgttctgcctaattttccaaactagagagctagcgcttgcaaattatgcttctgcacctagtaggcagttttttgaatttatctggaaattgcattatgcagagtacttagtttatgttttcatc

SEQ ID NO: 379 - DNA, 2031 bp, Artificial Sequence
  Synthetic
atggcttcagaaaaagaaattaggagagagagattcttgaacgttttccctaaattagtagaggaattgaacgcatcgcttttggcttacggtatgcctaaggaagcatgtgactggtatgcccactcattgaactacaacactccaggcggtaagctaaatagaggtttgtccgttgtggacacgtatgctattctctccaacaagaccgttgaacaattggggcaagaagaatacgaaaaggttgccattctaggttggtgcattgagttgttgcaggcttactggttggtcgccgatgatatgatggacaagtccattaccagaagaggccaaccatgttggtacaaggttcctgaagttggggaaattgccatctgggacgcattcatgttagaggctgctatctacaagcttttgaaatctcacttcagaaacgaaaaatactacatagatatcaccgaattgttccatgaggtcaccttccaaaccgaattgggccaattgatggacttaatcactgcacctgaagacaaagtcgacttgagtaagttctccctaaagaagcactccttcatagttactttcaagactgcttactattctttctacttgcctgtcgcattggccatgtacgttgccggtatcacggatgaaaaggatttgaaacaagccagagatgtcttgattccattgggtgaatacttccaaattcaagatgactacttagactgcttcggtaccccagaacagatcggtaagatcggtacagatatccaagataacaaatgttcttgggtaatcaacaaggcattggaacttgcttccgcagaacaaagaaagactttagacgaaaattacggtaagaaggactcagtcgcagaagccaaatgcaaaaagattttcaatgacttgaaaattgaacagctataccacgaatatgaagagtctattgccaaggatttgaaggccaaaatttctcaggtcgatgagtctcgtggcttcaaagctgatgtcttaactgcgttcttgaacaaagtttacaagagaagcaaaggttctggatccgcaggatcagatcaaatagaagggagcccccatcacgagtcggacaacagtatcgcgacaaaaattcttaattttggccatacttgttggaagttacagcgtccttacgtagttaaaggtttgatttctatcgcttgcggtttgttcggtaaggaactactccacaatacgaacttgatatcatggtctttaatgtttaaagccttctttgctctggtcccaattctaagtttcaattttttcgcagccgtggttaatcaaatctatgatgttgaaatagataggattaacaagccggatttaccactcgtgtccggagaaatgtctatagagacagcttggatcctgtcgattattgtcgctcttactggcttgatagttaccattaaaatgaaaggtggccctttatttgtgtttatctatatatttggtctattcgcaggttttgcttactctgtacctccaattcgatggaagcagtatccgttcactaactttttgatcaccatttcaagccatgttggactagccttcacatcctactatgcttctagagccgcgcttggtctaccatttgaactgcgcccctcatttagttttataattgcattcatgacagttatggggatgactattgcctttgcaaaggacatttcagatattgaaggagatgcaaaatatggtgtcagaacggtagctactaaattaggtgctagaaatatgacccgggttgtgtcgggggtgttgctattaaattacttagtcagtattttggcaggaataatctggccccaagcttttaattcaaatgtcatgatcttatcgcacgcaattttggccttctgtctcatctttaggacgagagaattagcccttgctaactacgcaagtgctccttcccgtcaatttttcgagtttatttggaacctgtattatgcggaatacctggtatacgttttcatt

SEQ ID NO: 380 - DNA, 2031 bp, Artificial Sequence
  Synthetic
atggcttcagaaaaagaaattaggagagagagattcttgaacgttttccctaaattagtagaggaattgaacgcatcgcttttggcttacggtatgcctaaggaagcatgtgactggtatgcccactcattgaactacaacactccaggcggtaagctaaatagaggtttgtccgttgtggacacgtatgctattctctccaacaagaccgttgaacaattggggcaagaagaatacgaaaaggttgccattctaggttggtgcattgagttgttgcaggcttactggttggtcgccgatgatatgatggacaagtccattaccagaagaggccaaccatgttggtacaaggttcctgaagttggggaaattgccatctgggacgcattcatgttagaggctgctatctacaagcttttgaaatctcacttcagaaacgaaaaatactacatagatatcaccgaattgttccatgaggtcaccttccaaaccgaattgggccaattgatggacttaatcactgcacctgaagacaaagtcgacttgagtaagttctccctaaagaagcactccttcatagttactttcaagactgcttactattctttctacttgcctgtcgcattggccatgtacgttgccggtatcacggatgaaaaggatttgaaacaagccagagatgtcttgattccattgggtgaatacttccaaattcaagatgactacttagactgcttcggtaccccagaacagatcggtaagatcggtacagatatccaagataacaaatgttcttgggtaatcaacaaggcattggaacttgcttccgcagaacaaagaaagactttagacgaaaattacggtaagaaggactcagtcgcagaagccaaatgcaaaaagattttcaatgacttgaaaattgaacagctataccacgaatatgaagagtctattgccaaggatttgaaggccaaaatttctcaggtcgatgagtctcgtggcttcaaagctgatgtcttaactgcgttcttgaacaaagtttacaagagaagcaaaggttctggatcagccgggagcgaccagatagaaggaagtcctcatcacgagtctgataactccattgcgacaaaaatcctgaatttcggtcatacgtgctggaagttacaaaggccctatgtcgtgaaaggtatgatttcgatagcttgtggcttgtttggtcgcgaactatttcataataccaaccttttatcttggtcattgatgctcaaggcattctcatccttaatggtaatcctttcttttaatttctttgctgccgttatgaatcaaatttacgatgttgatattgaccgaattaacaaaccagatttgccactcgttagtggagagatgagtatcgaaactgcatggatactatcgatcattgtcgctctgacaggcttaatattgactattaagcttaattgtggtccgctatttatatcattgtattgcgtatctttattcgctggatttgcatacagcgttcctccaattcgttggaaacagtatcctttcaccaacttcttaataactatcagctcacacgtgggtgttaactttacatgttattacgcctccagagcagcctttggcttacccttcgaaatgtctccgccatttacttttattctcgcttttatgaccgtaatgggaatgacaatagctttcgcgaaagacatttcagatatcgaaggtgatgcgaaatatggggtgtctactgttgctacgaagttaggtgcaagaaatatgacgtttgttgtcagtggtgtcttgttgctgacatacgtaagcgctatacttgcagctatcatttggccgcaagcctttaagtcaaatgtgatgttgttatctcatgccatcctggcgttctgcctaattttcagaactagagagctagcgcttgcaaattatgcttctgcacctagtaggcagttttttgaatttatctggaaattgcattatgcagagtacttagtttatgttttcatc

SEQ ID NO: 381 - DNA, 2031 bp, Artificial Sequence
  Synthetic
atggcttcagaaaaagaaattaggagagagagattcttgaacgttttccctaaattagtagaggaattgaacgcatcgcttttggcttacggtatgcctaaggaagcatgtgactggtatgcccactcattgaactacaacactccaggcggtaagctaaatagaggtttgtccgttgtggacacgtatgctattctctccaacaagaccgttgaacaattggggcaagaagaatacgaaaaggttgccattctaggttggtgcattgagttgttgcaggcttactggttggtcgccgatgatatgatggacaagtccattaccagaagaggccaaccatgttggtacaaggttcctgaagttggggaaattgccatctgggacgcattcatgttagaggctgctatctacaagcttttgaaatctcacttcagaaacgaaaaatactacatagatatcaccgaattgttccatgaggtcaccttccaaaccgaattgggccaattgatggacttaatcactgcacctgaagacaaagtcgacttgagtaagttctccctaaagaagcactccttcatagttactttcaagactgcttactattctttctacttgcctgtcgcattggccatgtacgttgccggtatcacggatgaaaaggatttgaaacaagccagagatgtcttgattccattgggtgaatacttccaaattcaagatgactacttagactgcttcggtaccccagaacagatcggtaagatcggtacagatatccaagataacaaatgttcttgggtaatcaacaaggcattggaacttgcttccgcagaacaaagaaagactttagacgaaaattacggtaagaaggactcagtcgcagaagccaaatgcaaaaagattttcaatgacttgaaaattgaacagctataccacgaatatgaagagtctattgccaaggatttgaaggccaaaatttctcaggtcgatgagtctcgtggcttcaaagctgatgtcttaactgcgttcttgaacaaagtttacaagagaagcaaaggttctggatcagccgggagcgaccagatagaaggaagtcctcatcacgagtctgataactccattgcgacaaaaatcctgaatttcggtcatacgtgctggaagttacaaaggccctatgtcgtgaaaggtttgatttcgatagcttgtggcttgtttggtcgcgaactatttcataataccaaccttttatcttggtcattgatgctcaaggcattctcatccttaatggtaatcctttcttttaatttctttgctgccataatgaatcaaatttacgatgttgatattgaccgaattaacaaaccagatttgccactcgttagtggagagatgagtatcgaaactgcatggatactatcgatcattgtcgctctgacaggcttaatattgactattaagcttaattgtggtccgctatttatatcattgtattgcgtatctattttcgctggatttgcatacagcgttcctccaattcgttggaaacagtatcctttcaccaacttcttaataactatcagctcacacgtgggtgttaactttacatgttattacgcctccagagcagcctttggcttacccttcgaaatgtctccgccatttacttttattctcgcttttatgaccgtaatgggaatgacaatagctttcgcgaaagacatttcagatatcgaaggtgatgcgaaatatggggtgtctactgttgctacgaagttaggtgcaagaaatatgacgtttgttgtcagtggtgtcttgttgctgacatacgtaagcgctatacttgcagctatcatttggccgcaagcctttaagtcaaatgtgatgttgttatctcatgccatcctggcgttctgcctaattttcagaactagagagctagcgcttgcaaattatgcttctgcacctagtaggcagttttttgaatttatctggaaattgcattatgcagagtacttagtttatgttttcatc

SEQ ID NO: 382 - DNA, 2031 bp, Artificial Sequence
  Synthetic
atggcttcagaaaaagaaattaggagagagagattcttgaacgttttccctaaattagtagaggaattgaacgcatcgcttttggcttacggtatgcctaaggaagcatgtgactggtatgcccactcattgaactacaacactccaggcggtaagctaaatagaggtttgtccgttgtggacacgtatgctattctctccaacaagaccgttgaacaattggggcaagaagaatacgaaaaggttgccattctaggttggtgcattgagttgttgcaggcttactggttggtcgccgatgatatgatggacaagtccattaccagaagaggccaaccatgttggtacaaggttcctgaagttggggaaattgccatctgggacgcattcatgttagaggctgctatctacaagcttttgaaatctcacttcagaaacgaaaaatactacatagatatcaccgaattgttccatgaggtcaccttccaaaccgaattgggccaattgatggacttaatcactgcacctgaagacaaagtcgacttgagtaagttctccctaaagaagcactccttcatagttactttcaagactgcttactattctttctacttgcctgtcgcattggccatgtacgttgccggtatcacggatgaaaaggatttgaaacaagccagagatgtcttgattccattgggtgaatacttccaaattcaagatgactacttagactgcttcggtaccccagaacagatcggtaagatcggtacagatatccaagataacaaatgttcttgggtaatcaacaaggcattggaacttgcttccgcagaacaaagaaagactttagacgaaaattacggtaagaaggactcagtcgcagaagccaaatgcaaaaagattttcaatgacttgaaaattgaacagctataccacgaatatgaagagtctattgccaaggatttgaaggccaaaatttctcaggtcgatgagtctcgtggcttcaaagctgatgtcttaactgcgttcttgaacaaagtttacaagagaagcaaaggttctggatcagccgggagcgaccagatagaaggaagtcctcatcacgagtctgataactccattgcgacaaaaatcctgaatttcggtcatacgtgctggaagttacaaaggccctatgtcgtgaaaggtatgatttcgatagcttgtggcttgtttggtcgcgaactatttcataataccaaccttttatcttggtcattgatgctcaaggcattctcatccttaatggtaatcctttcttttaatttctttgctgccgttatgaatcaaatttacgatgttgatattgaccgaattaacaaaccagatttgccactcgttagtggagagatgagtatcgaaactgcatggatactatcgatcattgtcgctctgacaggcttaatattgactattaagcttaattgtggtccgctatttatatcattgtattgcgtatctattttcgctggatttgcatacagcgttcctccaattcgttggaaacagtatcctttcaccaacttcttaataactatcagctcacacgtgggtgttaactttacatgttattacgcctccagagcagcctttggcttacccttcgaaatgtctccgccatttacttttattctcgcttttatgaccgtaatgggaatgacaatagctttcgcgaaagacatttcagatatcgaaggtgatgcgaaatatggggtgcggactgttgctacgaagttaggtgcaagaaatatgacgtttgttgtcagtggtgtcttgttgctgacatacgtaagcgctatacttgcagctatcatttggccgcaagcctttaagtcaaatgtgatgttgttatctcatgccatcctggcgttctgcctaattttcaggactagagagctagcgcttgcaaattatgcttctgcacctagtaggcagttttttgaatttatctggaaattgcattatgcagagtacttagtttatgttttcatc

SEQ ID NO: 383 - DNA, 2031 bp, Artificial Sequence
  Synthetic
atggcttcagaaaaagaaattaggagagagagattcttgaacgttttccctaaattagtagaggaattgaacgcatcgcttttggcttacggtatgcctaaggaagcatgtgactggtatgcccactcattgaactacaacactccaggcggtaagctaaatagaggtttgtccgttgtggacacgtatgctattctctccaacaagaccgttgaacaattggggcaagaagaatacgaaaaggttgccattctaggttggtgcattgagttgttgcaggcttactggttggtcgccgatgatatgatggacaagtccattaccagaagaggccaaccatgttggtacaaggttcctgaagttggggaaattgccatctgggacgcattcatgttagaggctgctatctacaagcttttgaaatctcacttcagaaacgaaaaatactacatagatatcaccgaattgttccatgaggtcaccttccaaaccgaattgggccaattgatggacttaatcactgcacctgaagacaaagtcgacttgagtaagttctccctaaagaagcactccttcatagttactttcaagactgcttactattctttctacttgcctgtcgcattggccatgtacgttgccggtatcacggatgaaaaggatttgaaacaagccagagatgtcttgattccattgggtgaatacttccaaattcaagatgactacttagactgcttcggtaccccagaacagatcggtaagatcggtacagatatccaagataacaaatgttcttgggtaatcaacaaggcattggaacttgcttccgcagaacaaagaaagactttagacgaaaattacggtaagaaggactcagtcgcagaagccaaatgcaaaaagattttcaatgacttgaaaattgaacagctataccacgaatatgaagagtctattgccaaggatttgaaggccaaaatttctcaggtcgatgagtctcgtggcttcaaagctgatgtcttaactgcgttcttgaacaaagtttacaagagaagcaaaggttctggatccgcaggatcagatcaaatagaagggagcccccatcacgagtcggacaacagtatcgcgacaaaaattcttaattttggccatactttctggaagttacagcgtccttacgtagttaaaggtctgatttctatcgcttgcggtttgttcggtaaggaactactccacaatacgaacttgatatcatggtctttaatgtttaaagccttctttgctctggtcccaattctaagtttcaattttttcgcagccgtggttaatcaaatctatgatgttgaaatagataggattaacaagccggatttaccactcgtgtccggagaaatgtctatagagacagcttggatcctgtcgattattgtcgctcttactggcttgatagttaccattaaaatgaaaggtggccctttatttgtgtttatctatatatttggtcttttcgcaggttttgcttactctgtacctccaattcgatggaagcagtatccgttcactaactttttgatcaccatttcaagccatgttggactagccttcacatcctactatgcttctagagccgcgcttggtctaccatttgaactgcgcccctcatttagttttataattgcattcatgacagttatggggatgactattgcctttgcaaaggacatttcagatattgaaggagatgcaaaatatggtgtcagaacggtagctactaaattaggtgctagaaatatgaccttcgttgtgtcgggggtgttgctattaaattacttagtcagtattttggcaggaataatctggccccaagcttttaattcaaatgtcatgatcttatcgcacgcaattttggccttctgtctcatctttcggacgagagaattagcccttgctaactacgcaagtgctccttcccgtcaatttttcgagtttatttggaacctgtattatgcggaatacctggtatacgttttcatt

SEQ ID NO: 384 - DNA, 2031 bp, Artificial Sequence
  Synthetic
atggcttcagaaaaagaaattaggagagagagattcttgaacgttttccctaaattagtagaggaattgaacgcatcgcttttggcttacggtatgcctaaggaagcatgtgactggtatgcccactcattgaactacaacactccaggcggtaagctaaatagaggtttgtccgttgtggacacgtatgctattctctccaacaagaccgttgaacaattggggcaagaagaatacgaaaaggttgccattctaggttggtgcattgagttgttgcaggcttactggttggtcgccgatgatatgatggacaagtccattaccagaagaggccaaccatgttggtacaaggttcctgaagttggggaaattgccatctgggacgcattcatgttagaggctgctatctacaagcttttgaaatctcacttcagaaacgaaaaatactacatagatatcaccgaattgttccatgaggtcaccttccaaaccgaattgggccaattgatggacttaatcactgcacctgaagacaaagtcgacttgagtaagttctccctaaagaagcactccttcatagttactttcaagactgcttactattctttctacttgcctgtcgcattggccatgtacgttgccggtatcacggatgaaaaggatttgaaacaagccagagatgtcttgattccattgggtgaatacttccaaattcaagatgactacttagactgcttcggtaccccagaacagatcggtaagatcggtacagatatccaagataacaaatgttcttgggtaatcaacaaggcattggaacttgcttccgcagaacaaagaaagactttagacgaaaattacggtaagaaggactcagtcgcagaagccaaatgcaaaaagattttcaatgacttgaaaattgaacagctataccacgaatatgaagagtctattgccaaggatttgaaggccaaaatttctcaggtcgatgagtctcgtggcttcaaagctgatgtcttaactgcgttcttgaacaaagtttacaagagaagcaaaggttctggatccgcaggatcagatcaaatagaagggagcccccatcacgagtcggacaacagtatcgcgacaaaaattcttaattttggccatactttctggaagttacagcgtccttacgtagttaaaggtctaatttctatcgcttgcggtttgttcggtaaggaactactccacaatacgaacttgatatcatggtctttaatgtttaaagccttctttgctctggtcccaattctaagtttcaattttttcgcagcctcggtgaatcaaatctatgatgttgaaatagataggattaacaagccggatttaccactcgtgtccggagaaatgtctatagagacagcttggatcctgtcgattattgtcgctcttactggcttgatagttaccattaaaatgaaaggtggccctttatttgtgtttatctatatatttggtttattcgcaggttttgcttactctgtacctccaattcgatggaagcagtatccgttcactaactttttgatcaccatttcaagccatgttggactagccttcacatcctactatgcttctagagccgcgcttggtctaccatttgaactgcgcccctcatttagttttataattgcattcatgacagttatggggatgactattgcctttgcaaaggacatttcagatattgaaggagatgcaaaatatggtgtcagaacggtagctactaaattaggtgctagaaatatgaccttcgttgtgtcgggggtgttgctattaaattacttagtcagtattttggcaggaataatctggccccaagcttttaattcaaatgtcatgatcttatcgcacgcaattttggccttctgtctcatctttaggacgagagaattagcccttgctaactacgcaagtgctccttcccgtcaatttttcgagtttatttggcgcctgtattatgcggaatacctggtatacgttttcatt

SEQ ID NO: 385 - DNA, 2031 bp, Artificial Sequence
  Synthetic
atggcttcagaaaaagaaattaggagagagagattcttgaacgttttccctaaattagtagaggaattgaacgcatcgcttttggcttacggtatgcctaaggaagcatgtgactggtatgcccactcattgaactacaacactccaggcggtaagctaaatagaggtttgtccgttgtggacacgtatgctattctctccaacaagaccgttgaacaattggggcaagaagaatacgaaaaggttgccattctaggttggtgcattgagttgttgcaggcttactggttggtcgccgatgatatgatggacaagtccattaccagaagaggccaaccatgttggtacaaggttcctgaagttggggaaattgccatctgggacgcattcatgttagaggctgctatctacaagcttttgaaatctcacttcagaaacgaaaaatactacatagatatcaccgaattgttccatgaggtcaccttccaaaccgaattgggccaattgatggacttaatcactgcacctgaagacaaagtcgacttgagtaagttctccctaaagaagcactccttcatagttactttcaagactgcttactattctttctacttgcctgtcgcattggccatgtacgttgccggtatcacggatgaaaaggatttgaaacaagccagagatgtcttgattccattgggtgaatacttccaaattcaagatgactacttagactgcttcggtaccccagaacagatcggtaagatcggtacagatatccaagataacaaatgttcttgggtaatcaacaaggcattggaacttgcttccgcagaacaaagaaagactttagacgaaaattacggtaagaaggactcagtcgcagaagccaaatgcaaaaagattttcaatgacttgaaaattgaacagctataccacgaatatgaagagtctattgccaaggatttgaaggccaaaatttctcaggtcgatgagtctcgtggcttcaaagctgatgtcttaactgcgttcttgaacaaagtttacaagagaagcaaaggttctggatcagccgggagcgaccagatagaaggaagtcctcatcacgagtctgataactccattgcgacaaaaatcctgaatttcggtcatacgtgctggaagttacaaaggccctatgtcgtgaaaggtatgatttcgatagcttgtggcttgtttggtcgcgaactatttcataataccaaccttttatcttggtcattgatgctcaaggcattctcatccttaatggtaatcctttcttttaatttctttgctgccgttatgaatcaaatttacgatgttgatattgaccgaattaacaaaccagatttgccactcgttagtggagagatgagtatcgaaactgcatggatactatcgatcattgtcgctctgacaggcttaatattgactattaagcttaattgtggtccgctatttatatcattgtattgcgtatctattttcgctggatttgcatacagcgttcctccaattcgttggaaaagatatcctttcaccaacttcttaataactatcagctcacacgtgggtgttaactttacatgttattacgcctccagagcagcctttggcttacccttcgaaatgtctccgccatttacttttattctcgcttttatgaccgtaatgggaatgacaatagctttcgcgaaagacatttcagatatcgaaggtgatgcgaaatatggggtgtctactgttgctacgaagttaggtgcaagaaatatgacgtttgttgtcagtggtgtcttgttgctgacatacgtaagcgctatacttgcagctatcatttggccgcaagcctttaagtcaaatgtgatgttgttatctcatgccatcctggcgttctgcctaattttcagaactagagagctagcgcttgcaaattatgcttctgcacctagtaggcagttttttgaatttatctggaaattgcattatgcagagtacttagtttatgttttcatc

SEQ ID NO: 386 - DNA, 2031 bp, Artificial Sequence
  Synthetic
atggcttcagaaaaagaaattaggagagagagattcttgaacgttttccctaaattagtagaggaattgaacgcatcgcttttggcttacggtatgcctaaggaagcatgtgactggtatgcccactcattgaactacaacactccaggcggtaagctaaatagaggtttgtccgttgtggacacgtatgctattctctccaacaagaccgttgaacaattggggcaagaagaatacgaaaaggttgccattctaggttggtgcattgagttgttgcaggcttactggttggtcgccgatgatatgatggacaagtccattaccagaagaggccaaccatgttggtacaaggttcctgaagttggggaaattgccatctgggacgcattcatgttagaggctgctatctacaagcttttgaaatctcacttcagaaacgaaaaatactacatagatatcaccgaattgttccatgaggtcaccttccaaaccgaattgggccaattgatggacttaatcactgcacctgaagacaaagtcgacttgagtaagttctccctaaagaagcactccttcatagttactttcaagactgcttactattctttctacttgcctgtcgcattggccatgtacgttgccggtatcacggatgaaaaggatttgaaacaagccagagatgtcttgattccattgggtgaatacttccaaattcaagatgactacttagactgcttcggtaccccagaacagatcggtaagatcggtacagatatccaagataacaaatgttcttgggtaatcaacaaggcattggaacttgcttccgcagaacaaagaaagactttagacgaaaattacggtaagaaggactcagtcgcagaagccaaatgcaaaaagattttcaatgacttgaaaattgaacagctataccacgaatatgaagagtctattgccaaggatttgaaggccaaaatttctcaggtcgatgagtctcgtggcttcaaagctgatgtcttaactgcgttcttgaacaaagtttacaagagaagcaaaggttctggatcagccgggagcgaccagatagaaggaagtcctcatcacgagtctgataactccattgcgacaaaaatcctgaatttcggtcatacgtgctggaagttacaaaggccctatgtcgtgaaaggtcttatttcgatagcttgtggcttgtttggtcgcgaactatttcataataccaaccttttatcttggtcattgatgctcaaggcattctcatccttaatggtaatcctttcttttaatttctttgctgccagtatgaatcaaatttacgatgttgatattgaccgaattaacaaaccagatttgccactcgttagtggagagatgagtatcgaaactgcatggatactatcgatcattgtcgctctgacaggcttaatattgactattaagcttaattgtggtccgctatttatatcattgtattgcgtatctattttcgctggatttgcatacagcgttcctccaattcgttggaaacagtatcctttcaccaacttcttaataactatcagctcacacgtgggtgttaactttacatgttattacgcctccagagcagcctttggcttacccttcgaaatgtctccgccatttacttttattctcgcttttatgaccgtaatgggaatgacaatagctttcgcgaaagacatttcagatatcgaaggtgatgcgaaatatggggtgtctactgttgctacgaagttaggtgcaagaaatatgacgtttgttgtcagtggtgtcttgttgctgacatacgtaagcgctatacttgcagctatcatttggccgcaagcctttaagtcaaatgtgatgttgttatctcatgccatcctggcgttctgcctaattttccaaactagagagctagcgcttgcaaattatgcttctgcacctagtaggcagttttttgaatttatctggaaattgcattatgcagagtacttagtttatgttttcatc

SEQ ID NO: 387 - DNA, 2031 bp, Artificial Sequence
  Synthetic
atggcttcagaaaaagaaattaggagagagagattcttgaacgttttccctaaattagtagaggaattgaacgcatcgcttttggcttacggtatgcctaaggaagcatgtgactggtatgcccactcattgaactacaacactccaggcggtaagctaaatagaggtttgtccgttgtggacacgtatgctattctctccaacaagaccgttgaacaattggggcaagaagaatacgaaaaggttgccattctaggttggtgcattgagttgttgcaggcttactggttggtcgccgatgatatgatggacaagtccattaccagaagaggccaaccatgttggtacaaggttcctgaagttggggaaattgccatctgggacgcattcatgttagaggctgctatctacaagcttttgaaatctcacttcagaaacgaaaaatactacatagatatcaccgaattgttccatgaggtcaccttccaaaccgaattgggccaattgatggacttaatcactgcacctgaagacaaagtcgacttgagtaagttctccctaaagaagcactccttcatagttactttcaagactgcttactattctttctacttgcctgtcgcattggccatgtacgttgccggtatcacggatgaaaaggatttgaaacaagccagagatgtcttgattccattgggtgaatacttccaaattcaagatgactacttagactgcttcggtaccccagaacagatcggtaagatcggtacagatatccaagataacaaatgttcttgggtaatcaacaaggcattggaacttgcttccgcagaacaaagaaagactttagacgaaaattacggtaagaaggactcagtcgcagaagccaaatgcaaaaagattttcaatgacttgaaaattgaacagctataccacgaatatgaagagtctattgccaaggatttgaaggccaaaatttctcaggtcgatgagtctcgtggcttcaaagctgatgtcttaactgcgttcttgaacaaagtttacaagagaagcaaaggttctggatccgcaggatcagatcaaatagaagggagcccccatcacgagtcggacaacagtatcgcgacaaaaattcttaattttggccatactttctggaagttacagcgtccttacgtagttaaaggtctgatttctatcgcttgcggtttgttcggtaaggaactactccacaatacgaacttgatatcatggtctttaatgtttaaagccttctttgctctggtcccaattctaagtttcaattttttcgcagccgtgatgaatcaaatctatgatgttgaaatagataggattaacaagccggatttaccactcgtgtccggagaaatgtctatagagacagcttggatcctgtcgattattgtcgctcttactggcttgatagttaccattaaaatgaaaggtggccctttatttgtgtttatctatatatttggtctattcgcaggttttgcttactctgtacctccaattcgatggaagcagtatccgttcactaactttttgatcaccatttcaagccatgttggactagccttcacatcctactatgcttctagagccgcgcttggtctaccatttgaactgcgcccctcatttagttttataattgcattcatgacagttatggggatgactattgcctttgcaaaggacatttcagatattgaaggagatgcaaaatatggtgtcagaacggtagctactaaattaggtgctagaaatatgacccgtgttgtgtcgggggtgttgctattaaattacttagtcagtattttggcaggaataatctggccccaagcttttaattcaaatgtcatgatcttatcgcacgcaattttggccttctgtctcatctttaggacgagagaattagcccttgctaactacgcaagtgctccttcccgtcaatttttcgagtttatttggaatctgtattatgcggaatacctggtatacgttttcatt

SEQ ID NO: 388 - DNA, 2031 bp, Artificial Sequence
  Synthetic
atggcttcagaaaaagaaattaggagagagagattcttgaacgttttccctaaattagtagaggaattgaacgcatcgcttttggcttacggtatgcctaaggaagcatgtgactggtatgcccactcattgaactacaacactccaggcggtaagctaaatagaggtttgtccgttgtggacacgtatgctattctctccaacaagaccgttgaacaattggggcaagaagaatacgaaaaggttgccattctaggttggtgcattgagttgttgcaggcttactggttggtcgccgatgatatgatggacaagtccattaccagaagaggccaaccatgttggtacaaggttcctgaagttggggaaattgccatctgggacgcattcatgttagaggctgctatctacaagcttttgaaatctcacttcagaaacgaaaaatactacatagatatcaccgaattgttccatgaggtcaccttccaaaccgaattgggccaattgatggacttaatcactgcacctgaagacaaagtcgacttgagtaagttctccctaaagaagcactccttcatagttactttcaagactgcttactattctttctacttgcctgtcgcattggccatgtacgttgccggtatcacggatgaaaaggatttgaaacaagccagagatgtcttgattccattgggtgaatacttccaaattcaagatgactacttagactgcttcggtaccccagaacagatcggtaagatcggtacagatatccaagataacaaatgttcttgggtaatcaacaaggcattggaacttgcttccgcagaacaaagaaagactttagacgaaaattacggtaagaaggactcagtcgcagaagccaaatgcaaaaagattttcaatgacttgaaaattgaacagctataccacgaatatgaagagtctattgccaaggatttgaaggccaaaatttctcaggtcgatgagtctcgtggcttcaaagctgatgtcttaactgcgttcttgaacaaagtttacaagagaagcaaaggttctggatccgcaggatcagatcaaatagaagggagcccccatcacgagtcggacaacagtatcgcgacaaaaattcttaattttggccatactttctggaagttacagcgtccttacgtagttaaaggtttgatttctatcgcttgcggtttgttcggtaaggaactactccacaatacgaacttgatatcatggtctttaatgtttaaagccttctttgctctggtcccaattctaagtttcaattttttcgcagcctccatgaatcaaatctatgatgttgagatagataggattaacaagccggatttaccactcgtgtccggagaaatgtctatagagacagcttggatcctgtcgattattgtcgctcttactggcttgatagttaccattaaaatgaaaggtggccctttatttgtgtttatctatatatttggtctgttcgcaggttttgcttactctgtacctccaattcgatggaagcagtatccgttcactaactttttgatcaccatttcaagccatgttggactagccttcacatcctactatgcttctagagccgcgcttggtctaccatttgaactgcgcccctcatttagttttataattgcattcatgacagttatggggatgactattgcctttgcaaaggacatttcagatattgaaggagatgcaaaatatggtgtcagaacggtagctactaaattaggtgctagaaatatgaccagggttgtgtcgggggtgttgctattaaattacttagtcagtattttggcaggaataatctggccccaagcttttaattcaaatgtcatgatcttatcgcacgcaattttggccttctgtctcatctttagaacgagagaattagcccttgctaactacgcaagtgctccttcccgtcaatttttcgagtttatttggcggctgtattatgcggaatacctggtatacgttttcatt

SEQ ID NO: 389 - DNA, 2031 bp, Artificial Sequence
  Synthetic
atggcttcagaaaaagaaattaggagagagagattcttgaacgttttccctaaattagtagaggaattgaacgcatcgcttttggcttacggtatgcctaaggaagcatgtgactggtatgcccactcattgaactacaacactccaggcggtaagctaaatagaggtttgtccgttgtggacacgtatgctattctctccaacaagaccgttgaacaattggggcaagaagaatacgaaaaggttgccattctaggttggtgcattgagttgttgcaggcttactggttggtcgccgatgatatgatggacaagtccattaccagaagaggccaaccatgttggtacaaggttcctgaagttggggaaattgccatctgggacgcattcatgttagaggctgctatctacaagcttttgaaatctcacttcagaaacgaaaaatactacatagatatcaccgaattgttccatgaggtcaccttccaaaccgaattgggccaattgatggacttaatcactgcacctgaagacaaagtcgacttgagtaagttctccctaaagaagcactccttcatagttactttcaagactgcttactattctttctacttgcctgtcgcattggccatgtacgttgccggtatcacggatgaaaaggatttgaaacaagccagagatgtcttgattccattgggtgaatacttccaaattcaagatgactacttagactgcttcggtaccccagaacagatcggtaagatcggtacagatatccaagataacaaatgttcttgggtaatcaacaaggcattggaacttgcttccgcagaacaaagaaagactttagacgaaaattacggtaagaaggactcagtcgcagaagccaaatgcaaaaagattttcaatgacttgaaaattgaacagctataccacgaatatgaagagtctattgccaaggatttgaaggccaaaatttctcaggtcgatgagtctcgtggcttcaaagctgatgtcttaactgcgttcttgaacaaagtttacaagagaagcaaaggttctggatcagccgggagcgaccagatagaaggaagtcctcatcacgagtctgataactccattgcgacaaaaatcctgaatttcggtcatacgtgctggaagttacaaaggccctatgtcgtgaaaggtctaatttcgatagcttgtggcttgtttggtcgcgaactatttcataataccaaccttttatcttggtcattgatgctcaaggcattctcatccttaatggtaatcctttcttttaatttctttgctgccgttatgaatcaaatttacgatgttgatattgaccgaattaacaaaccagatttgccactcgttagtggagagatgagtatcgaaactgcatggatactatcgatcattgtcgctctgacaggcttaatattgactattaagcttaattgtggtccgctatttatatcattgtattgcgtatctctgttcgctggatttgcatacagcgttcctccaattcgttggaaacagtatcctttcaccaacttcttaataactatcagctcacacgtgggtgttaactttacatgttattacgcctccagagcagcctttggcttacccttcgaaatgtctccgccatttacttttattctcgcttttatgaccgtaatgggaatgacaatagctttcgcgaaagacatttcagatatcgaaggtgatgcgaaatatggggtgtctactgttgctacgaagttaggtgcaagaaatatgacgtttgttgtcagtggtgtcttgttgctgacatacgtaagcgctatacttgcagctatcatttggccgcaagcctttaagtcaaatgtgatgttgttatctcatgccatcctggcgttctgcctaattttccaaactagagagctagcgcttgcaaattatgcttctgcacctagtaggcagttttttgaatttatctggaaattgcattatgcagagtacttagtttatgttttcatc

SEQ ID NO: 390 - DNA, 2031 bp, Artificial Sequence
  Synthetic
atggcttcagaaaaagaaattaggagagagagattcttgaacgttttccctaaattagtagaggaattgaacgcatcgcttttggcttacggtatgcctaaggaagcatgtgactggtatgcccactcattgaactacaacactccaggcggtaagctaaatagaggtttgtccgttgtggacacgtatgctattctctccaacaagaccgttgaacaattggggcaagaagaatacgaaaaggttgccattctaggttggtgcattgagttgttgcaggcttactggttggtcgccgatgatatgatggacaagtccattaccagaagaggccaaccatgttggtacaaggttcctgaagttggggaaattgccatctgggacgcattcatgttagaggctgctatctacaagcttttgaaatctcacttcagaaacgaaaaatactacatagatatcaccgaattgttccatgaggtcaccttccaaaccgaattgggccaattgatggacttaatcactgcacctgaagacaaagtcgacttgagtaagttctccctaaagaagcactccttcatagttactttcaagactgcttactattctttctacttgcctgtcgcattggccatgtacgttgccggtatcacggatgaaaaggatttgaaacaagccagagatgtcttgattccattgggtgaatacttccaaattcaagatgactacttagactgcttcggtaccccagaacagatcggtaagatcggtacagatatccaagataacaaatgttcttgggtaatcaacaaggcattggaacttgcttccgcagaacaaagaaagactttagacgaaaattacggtaagaaggactcagtcgcagaagccaaatgcaaaaagattttcaatgacttgaaaattgaacagctataccacgaatatgaagagtctattgccaaggatttgaaggccaaaatttctcaggtcgatgagtctcgtggcttcaaagctgatgtcttaactgcgttcttgaacaaagtttacaagagaagcaaaggttctggatccgcaggatcagatcaaatagaagggagcccccatcacgagtcggacaacagtatcgcgacaaaaattcttaattttggccatactttctggaagttacagcgtccttacgtagttaaaggtttgatttctatcgcttgcggtttgttcggtaaggaactactccacaatacgaacttgatatcatggtctttaatgtttaaagccttctttgctctggtcccaattctaagtttcaattttttcgcagccagcgtgaatcaaatctatgatgttgacatagataggattaacaagccggatttaccactcgtgtccggagaaatgtctatagagacagcttggatcctgtcgattattgtcgctcttactggcttgatagttaccattaaaatgaaaggtggccctttatttgtgtttatctatatatttggtctattcgcaggttttgcttactctgtacctccaattcgatggaagcagtatccgttcactaactttttgatcaccatttcaagccatgttggactagccttcacatcctactatgcttctagagccgcgcttggtctaccatttgaactgcgcccctcatttagttttataattgcattcatgacagttatggggatgactattgcctttgcaaaggacatttcagatattgaaggagatgcaaaatatggtgtcagaacggtagctactaaattaggtgctagaaatatgacccgggttgtgtcgggggtgttgctattaaattacttagtcagtattttggcaggaataatctggccccaagcttttaattcaaatgtcatgatcttatcgcacgcaattttggccttctgtctcatctttaggacgagagaattagcccttgctaactacgcaagtgctccttcccgtcaatttttcgagtttatttggagactgtattatgcggaatacctggtatacgttttcatt

SEQ ID NO: 391 - DNA, 2031 bp, Artificial Sequence
  Synthetic
atggcttcagaaaaagaaattaggagagagagattcttgaacgttttccctaaattagtagaggaattgaacgcatcgcttttggcttacggtatgcctaaggaagcatgtgactggtatgcccactcattgaactacaacactccaggcggtaagctaaatagaggtttgtccgttgtggacacgtatgctattctctccaacaagaccgttgaacaattggggcaagaagaatacgaaaaggttgccattctaggttggtgcattgagttgttgcaggcttactggttggtcgccgatgatatgatggacaagtccattaccagaagaggccaaccatgttggtacaaggttcctgaagttggggaaattgccatctgggacgcattcatgttagaggctgctatctacaagcttttgaaatctcacttcagaaacgaaaaatactacatagatatcaccgaattgttccatgaggtcaccttccaaaccgaattgggccaattgatggacttaatcactgcacctgaagacaaagtcgacttgagtaagttctccctaaagaagcactccttcatagttactttcaagactgcttactattctttctacttgcctgtcgcattggccatgtacgttgccggtatcacggatgaaaaggatttgaaacaagccagagatgtcttgattccattgggtgaatacttccaaattcaagatgactacttagactgcttcggtaccccagaacagatcggtaagatcggtacagatatccaagataacaaatgttcttgggtaatcaacaaggcattggaacttgcttccgcagaacaaagaaagactttagacgaaaattacggtaagaaggactcagtcgcagaagccaaatgcaaaaagattttcaatgacttgaaaattgaacagctataccacgaatatgaagagtctattgccaaggatttgaaggccaaaatttctcaggtcgatgagtctcgtggcttcaaagctgatgtcttaactgcgttcttgaacaaagtttacaagagaagcaaaggttctggatcagccgggagcgaccagatagaaggaagtcctcatcacgagtctgataactccattgcgacaaaaatcctgaatttcggtcatacgtgctggaagttacaaaggccctatgtcgtgaaaggtatgatttcgatagcttgtggcttgtttggtcgcgaactatttcataataccaaccttttatcttggtcattgatgctcaaggcattctcatccttaatggtaatcctttcttttaatttctttgctgccgttatgaatcaaatttacgatgttgatattgaccgaattaacaaaccagatttgccactcgttagtggagagatgagtatcgaaactgcatggatactatcgatcattgtcgctctgacaggcttaatattgactattaagcttaattgtggtccgctatttatatcattgtattgcgtatctctgttcgctggatttgcatacagcgttcctccaattcgttggaaacagtatcctttcaccaacttcttaataactatcagctcacacgtgggtgttaactttacatgttattacgcctccagagcagcctttggcttacccttcgaaatgtctccgccatttacttttattctcgcttttatgaccgtaatgggaatgacaatagctttcgcgaaagacatttcagatatcgaaggtgatgcgaaatatggggtgtctactgttgctacgaagttaggtgcaagaaatatgacgtttgttgtcagtggtgtcttgttgctgacatacgtaagcgctatacttgcagctatcatttggccgcaagcctttaagtcaaatgtgatgttgttatctcatgccatcctggcgttctgcctaattttccaaactagagagctagcgcttgcaaattatgcttctgcacctagtaggcagttttttgaatttatctggaaattgcattatgcagagtacttagtttatgttttcatc

SEQ ID NO: 392 - DNA, 2031 bp, Artificial Sequence
  Synthetic
atggcttcagaaaaagaaattaggagagagagattcttgaacgttttccctaaattagtagaggaattgaacgcatcgcttttggcttacggtatgcctaaggaagcatgtgactggtatgcccactcattgaactacaacactccaggcggtaagctaaatagaggtttgtccgttgtggacacgtatgctattctctccaacaagaccgttgaacaattggggcaagaagaatacgaaaaggttgccattctaggttggtgcattgagttgttgcaggcttactggttggtcgccgatgatatgatggacaagtccattaccagaagaggccaaccatgttggtacaaggttcctgaagttggggaaattgccatctgggacgcattcatgttagaggctgctatctacaagcttttgaaatctcacttcagaaacgaaaaatactacatagatatcaccgaattgttccatgaggtcaccttccaaaccgaattgggccaattgatggacttaatcactgcacctgaagacaaagtcgacttgagtaagttctccctaaagaagcactccttcatagttactttcaagactgcttactattctttctacttgcctgtcgcattggccatgtacgttgccggtatcacggatgaaaaggatttgaaacaagccagagatgtcttgattccattgggtgaatacttccaaattcaagatgactacttagactgcttcggtaccccagaacagatcggtaagatcggtacagatatccaagataacaaatgttcttgggtaatcaacaaggcattggaacttgcttccgcagaacaaagaaagactttagacgaaaattacggtaagaaggactcagtcgcagaagccaaatgcaaaaagattttcaatgacttgaaaattgaacagctataccacgaatatgaagagtctattgccaaggatttgaaggccaaaatttctcaggtcgatgagtctcgtggcttcaaagctgatgtcttaactgcgttcttgaacaaagtttacaagagaagcaaaggttctggatccgcaggatcagatcaaatagaagggagcccccatcacgagtcggacaacagtatcgcgacaaaaattcttaattttggccatactttctggaagttacagcgtccttacgtagttaaaggtctaatttctatcgcttgcggtttgttcggtaaggaactactccacaatacgaacttgatatcatggtctttaatgtttaaagccttctttgctctggtcccaattctaagtttcaattttttcgcagccgtggttaatcaaatctatgatgttgacatagataggattaacaagccggatttaccactcgtgtccggagaaatgtctatagagacagcttggatcctgtcgattattgtcgctcttactggcttgatagttaccattaaaatgaaaggtggccctttatttgtgtttatctatatatttggtttgttcgcaggttttgcttactctgtacctccaattcgatggaagcagtatccgttcactaactttttgatcaccatttcaagccatgttggactagccttcacatcctactatgcttctagagccgcgcttggtctaccatttgaactgcgcccctcatttagttttataattgcattcatgacagttatggggatgactattgcctttgcaaaggacatttcagatattgaaggagatgcaaaatatggtgtcagaacggtagctactaaattaggtgctagaaatatgacccgggttgtgtcgggggtgttgctattaaattacttagtcagtattttggcaggaataatctggccccaagcttttaattcaaatgtcatgatcttatcgcacgcaattttggccttctgtctcatctttagaacgagagaattagcccttgctaactacgcaagtgctccttcccgtcaatttttcgagtttatttggaacctgtattatgcggaatacctggtatacgttttcatt

SEQ ID NO: 393 - DNA, 2031 bp, Artificial Sequence
  Synthetic
atggcttcagaaaaagaaattaggagagagagattcttgaacgttttccctaaattagtagaggaattgaacgcatcgcttttggcttacggtatgcctaaggaagcatgtgactggtatgcccactcattgaactacaacactccaggcggtaagctaaatagaggtttgtccgttgtggacacgtatgctattctctccaacaagaccgttgaacaattggggcaagaagaatacgaaaaggttgccattctaggttggtgcattgagttgttgcaggcttactggttggtcgccgatgatatgatggacaagtccattaccagaagaggccaaccatgttggtacaaggttcctgaagttggggaaattgccatctgggacgcattcatgttagaggctgctatctacaagcttttgaaatctcacttcagaaacgaaaaatactacatagatatcaccgaattgttccatgaggtcaccttccaaaccgaattgggccaattgatggacttaatcactgcacctgaagacaaagtcgacttgagtaagttctccctaaagaagcactccttcatagttactttcaagactgcttactattctttctacttgcctgtcgcattggccatgtacgttgccggtatcacggatgaaaaggatttgaaacaagccagagatgtcttgattccattgggtgaatacttccaaattcaagatgactacttagactgcttcggtaccccagaacagatcggtaagatcggtacagatatccaagataacaaatgttcttgggtaatcaacaaggcattggaacttgcttccgcagaacaaagaaagactttagacgaaaattacggtaagaaggactcagtcgcagaagccaaatgcaaaaagattttcaatgacttgaaaattgaacagctataccacgaatatgaagagtctattgccaaggatttgaaggccaaaatttctcaggtcgatgagtctcgtggcttcaaagctgatgtcttaactgcgttcttgaacaaagtttacaagagaagcaaaggttctggatcagccgggagcgaccagatagaaggaagtcctcatcacgagtctgataactccattgcgacaaaaatcctgaatttcggtcatacgtgctggaagttacaaaggccctatgtcgtgaaaggtatgatttcgatagcttgtggcttgtttggtcgcgaactatttcataataccaaccttttatcttggtcattgatgctcaaggcattctcatccttaatggtaatcctttcttttaatttctttgctgccgttatgaatcaaatttacgatgttgatattgaccgaattaacaaaccagatttgccactcgttagtggagagatgagtatcgaaactgcatggatactatcgatcattgtcgctctgacaggcttaatattgactattaagcttaattgtggtccgctatttatatcattgtattgcgtatctattttcgctggatttgcatacagcgttcctccaattcgttggaaacagtatcctttcaccaacttcttaataactatcagctcacacgtgggtgttaactttacatgttattacgcctccagagcagcctttggcttacccttcgaaatgtctccgccatttacttttattctcgcttttatgaccgtaatgggaatgacaatagctttcgcgaaagacatttcagatatcgaaggtgatgcgaaatatggggtgcggactgttgctacgaagttaggtgcaagaaatatgacgtttgttgtcagtggtgtcttgttgctgacatacgtaagcgctatacttgcagctatcatttggccgcaagcctttaagtcaaatgtgatgttgttatctcatgccatcctggcgttctgcctaattttccaaactagagagctagcgcttgcaaattatgcttctgcacctagtaggcagttttttgaatttatctggaaattgcattatgcagagtacttagtttatgttttcatc

SEQ ID NO: 394 - DNA, 2031 bp, Artificial Sequence
  Synthetic
atggcttcagaaaaagaaattaggagagagagattcttgaacgttttccctaaattagtagaggaattgaacgcatcgcttttggcttacggtatgcctaaggaagcatgtgactggtatgcccactcattgaactacaacactccaggcggtaagctaaatagaggtttgtccgttgtggacacgtatgctattctctccaacaagaccgttgaacaattggggcaagaagaatacgaaaaggttgccattctaggttggtgcattgagttgttgcaggcttactggttggtcgccgatgatatgatggacaagtccattaccagaagaggccaaccatgttggtacaaggttcctgaagttggggaaattgccatctgggacgcattcatgttagaggctgctatctacaagcttttgaaatctcacttcagaaacgaaaaatactacatagatatcaccgaattgttccatgaggtcaccttccaaaccgaattgggccaattgatggacttaatcactgcacctgaagacaaagtcgacttgagtaagttctccctaaagaagcactccttcatagttactttcaagactgcttactattctttctacttgcctgtcgcattggccatgtacgttgccggtatcacggatgaaaaggatttgaaacaagccagagatgtcttgattccattgggtgaatacttccaaattcaagatgactacttagactgcttcggtaccccagaacagatcggtaagatcggtacagatatccaagataacaaatgttcttgggtaatcaacaaggcattggaacttgcttccgcagaacaaagaaagactttagacgaaaattacggtaagaaggactcagtcgcagaagccaaatgcaaaaagattttcaatgacttgaaaattgaacagctataccacgaatatgaagagtctattgccaaggatttgaaggccaaaatttctcaggtcgatgagtctcgtggcttcaaagctgatgtcttaactgcgttcttgaacaaagtttacaagagaagcaaaggttctggatcagccgggagcgaccagatagaaggaagtcctcatcacgagtctgataactccattgcgacaaaaatcctgaatttcggtcatacgtgctggaagttacaaaggccctatgtcgtgaaaggtcttatttcgatagcttgtggcttgtttggtcgcgaactatttcataataccaaccttttatcttggtcattgatgctcaaggcattctcatccttaatggtaatcctttcttttaatttctttgctgccgttatgaatcaaatttacgatgttgatattgaccgaattaacaaaccagatttgccactcgttagtggagagatgagtatcgaaactgcatggatactatcgatcattgtcgctctgacaggcttaatattgactattaagcttaattgtggtccgctatttatatcattgtattgcgtatctattttcgctggatttgcatacagcgttcctccaattcgttggaaacagtatcctttcaccaacttcttaataactatcagctcacacgtgggtgttaactttacatgttattacgcctccagagcagcctttggcttacccttcgaaatgtctccgccatttacttttattctcgcttttatgaccgtaatgggaatgacaatagctttcgcgaaagacatttcagatatcgaaggtgatgcgaaatatggggtgagaactgttgctacgaagttaggtgcaagaaatatgacgtttgttgtcagtggtgtcttgttgctgacatacgtaagcgctatacttgcagctatcatttggccgcaagcctttaagtcaaatgtgatgttgttatctcatgccatcctggcgttctgcctaattttccaaactagagagctagcgcttgcaaattatgcttctgcacctagtaggcagttttttgaatttatctggaaattgcattatgcagagtacttagtttatgttttcatc

SEQ ID NO: 395 - DNA, 2031 bp, Artificial Sequence
  Synthetic
atggcttcagaaaaagaaattaggagagagagattcttgaacgttttccctaaattagtagaggaattgaacgcatcgcttttggcttacggtatgcctaaggaagcatgtgactggtatgcccactcattgaactacaacactccaggcggtaagctaaatagaggtttgtccgttgtggacacgtatgctattctctccaacaagaccgttgaacaattggggcaagaagaatacgaaaaggttgccattctaggttggtgcattgagttgttgcaggcttactggttggtcgccgatgatatgatggacaagtccattaccagaagaggccaaccatgttggtacaaggttcctgaagttggggaaattgccatctgggacgcattcatgttagaggctgctatctacaagcttttgaaatctcacttcagaaacgaaaaatactacatagatatcaccgaattgttccatgaggtcaccttccaaaccgaattgggccaattgatggacttaatcactgcacctgaagacaaagtcgacttgagtaagttctccctaaagaagcactccttcatagttactttcaagactgcttactattctttctacttgcctgtcgcattggccatgtacgttgccggtatcacggatgaaaaggatttgaaacaagccagagatgtcttgattccattgggtgaatacttccaaattcaagatgactacttagactgcttcggtaccccagaacagatcggtaagatcggtacagatatccaagataacaaatgttcttgggtaatcaacaaggcattggaacttgcttccgcagaacaaagaaagactttagacgaaaattacggtaagaaggactcagtcgcagaagccaaatgcaaaaagattttcaatgacttgaaaattgaacagctataccacgaatatgaagagtctattgccaaggatttgaaggccaaaatttctcaggtcgatgagtctcgtggcttcaaagctgatgtcttaactgcgttcttgaacaaagtttacaagagaagcaaaggttctggatccgcaggatcagatcaaatagaagggagcccccatcacgagtcggacaacagtatcgcgacaaaaattcttaattttggccatactttctggaagttacagcgtccttacgtagttaaaggtatgatttctatcgcttgcggtttgttcggtaaggaactactccacaatacgaacttgatatcatggtctttaatgtttaaagccttctttgctctggtcccaattctaagtttcaattttttcgcagccgtggttaatcaaatctatgatgttgagatagataggattaacaagccggatttaccactcgtgtccggagaaatgtctatagagacagcttggatcctgtcgattattgtcgctcttactggcttgatagttaccattaaaatgaaaggtggccctttatttgtgtttatctatatatttggtttgttcgcaggttttgcttactctgtacctccaattcgatggaagcagtatccgttcactaactttttgatcaccatttcaagccatgttggactagccttcacatcctactatgcttctagagccgcgcttggtctaccatttgaactgcgcccctcatttagttttataattgcattcatgacagttatggggatgactattgcctttgcaaaggacatttcagatattgaaggagatgcaaaatatggtgtcagaacggtagctactaaattaggtgctagaaatatgaccagggttgtgtcgggggtgttgctattaaattacttagtcagtattttggcaggaataatctggccccaagcttttaattcaaatgtcatgatcttatcgcacgcaattttggccttctgtctcatctttagaacgagagaattagcccttgctaactacgcaagtgctccttcccgtcaatttttcgagtttatttggcgtctgtattatgcggaatacctggtatacgttttcatt

SEQ ID NO: 396 - DNA, 2031 bp, Artificial Sequence
  Synthetic
atggcttcagaaaaagaaattaggagagagagattcttgaacgttttccctaaattagtagaggaattgaacgcatcgcttttggcttacggtatgcctaaggaagcatgtgactggtatgcccactcattgaactacaacactccaggcggtaagctaaatagaggtttgtccgttgtggacacgtatgctattctctccaacaagaccgttgaacaattggggcaagaagaatacgaaaaggttgccattctaggttggtgcattgagttgttgcaggcttactggttggtcgccgatgatatgatggacaagtccattaccagaagaggccaaccatgttggtacaaggttcctgaagttggggaaattgccatctgggacgcattcatgttagaggctgctatctacaagcttttgaaatctcacttcagaaacgaaaaatactacatagatatcaccgaattgttccatgaggtcaccttccaaaccgaattgggccaattgatggacttaatcactgcacctgaagacaaagtcgacttgagtaagttctccctaaagaagcactccttcatagttactttcaagactgcttactattctttctacttgcctgtcgcattggccatgtacgttgccggtatcacggatgaaaaggatttgaaacaagccagagatgtcttgattccattgggtgaatacttccaaattcaagatgactacttagactgcttcggtaccccagaacagatcggtaagatcggtacagatatccaagataacaaatgttcttgggtaatcaacaaggcattggaacttgcttccgcagaacaaagaaagactttagacgaaaattacggtaagaaggactcagtcgcagaagccaaatgcaaaaagattttcaatgacttgaaaattgaacagctataccacgaatatgaagagtctattgccaaggatttgaaggccaaaatttctcaggtcgatgagtctcgtggcttcaaagctgatgtcttaactgcgttcttgaacaaagtttacaagagaagcaaaggttctggatccgcaggatcagatcaaatagaagggagcccccatcacgagtcggacaacagtatcgcgacaaaaattcttaattttggccatactttctggaagttacagcgtccttacgtagttaaaggtatgatttctatcgcttgcggtttgttcggtaaggaactactccacaatacgaacttgatatcatggtctttaatgtttaaagccttctttgctctggtcccaattctaagtttcaattttttcgcagccgcagttaatcaaatctatgatgttgagatagataggattaacaagccggatttaccactcgtgtccggagaaatgtctatagagacagcttggatcctgtcgattattgtcgctcttactggcttgatagttaccattaaaatgaaaggtggccctttatttgtgtttatctatatatttggtttgttcgcaggttttgcttactctgtacctccaattcgatggaagcagtatccgttcactaactttttgatcaccatttcaagccatgttggactagccttcacatcctactatgcttctagagccgcgcttggtctaccatttgaactgcgcccctcatttagttttataattgcattcatgacagttatggggatgactattgcctttgcaaaggacatttcagatattgaaggagatgcaaaatatggtgtcagaacggtagctactaaattaggtgctagaaatatgacccgggttgtgtcgggggtgttgctattaaattacttagtcagtattttggcaggaataatctggccccaagcttttaattcaaatgtcatgatcttatcgcacgcaattttggccttctgtctcatctttaggacgagagaattagcccttgctaactacgcaagtgctccttcccgtcaatttttcgagtttatttggaacctgtattatgcggaatacctggtatacgttttcatt

SEQ ID NO: 397 - DNA, 2031 bp, Artificial Sequence
  Synthetic
atggcttcagaaaaagaaattaggagagagagattcttgaacgttttccctaaattagtagaggaattgaacgcatcgcttttggcttacggtatgcctaaggaagcatgtgactggtatgcccactcattgaactacaacactccaggcggtaagctaaatagaggtttgtccgttgtggacacgtatgctattctctccaacaagaccgttgaacaattggggcaagaagaatacgaaaaggttgccattctaggttggtgcattgagttgttgcaggcttactggttggtcgccgatgatatgatggacaagtccattaccagaagaggccaaccatgttggtacaaggttcctgaagttggggaaattgccatctgggacgcattcatgttagaggctgctatctacaagcttttgaaatctcacttcagaaacgaaaaatactacatagatatcaccgaattgttccatgaggtcaccttccaaaccgaattgggccaattgatggacttaatcactgcacctgaagacaaagtcgacttgagtaagttctccctaaagaagcactccttcatagttactttcaagactgcttactattctttctacttgcctgtcgcattggccatgtacgttgccggtatcacggatgaaaaggatttgaaacaagccagagatgtcttgattccattgggtgaatacttccaaattcaagatgactacttagactgcttcggtaccccagaacagatcggtaagatcggtacagatatccaagataacaaatgttcttgggtaatcaacaaggcattggaacttgcttccgcagaacaaagaaagactttagacgaaaattacggtaagaaggactcagtcgcagaagccaaatgcaaaaagattttcaatgacttgaaaattgaacagctataccacgaatatgaagagtctattgccaaggatttgaaggccaaaatttctcaggtcgatgagtctcgtggcttcaaagctgatgtcttaactgcgttcttgaacaaagtttacaagagaagcaaaggttctggatcagccgggagcgaccagatagaaggaagtcctcatcacgagtctgataactccattgcgacaaaaatcctgaatttcggtcatacgtgctggaagttacaaaggccctatgtcgtgaaaggtatgatttcgatagcttgtggcttgtttggtcgcgaactatttcataataccaaccttttatcttggtcattgatgctcaaggcattctcatccttaatggtaatcctttcttttaatttctttgctgccgttatgaatcaaatttacgatgttgatattgaccgaattaacaaaccagatttgccactcgttagtggagagatgagtatcgaaactgcatggatactatcgatcattgtcgctctgacaggcttaatattgactattaagcttaattgtggtccgctatttatatcattgtattgcgtatctattttcgctggatttgcatacagcgttcctccaattcgttggaaaagatatcctttcaccaacttcttaataactatcagctcacacgtgggtgttaactttacatgttattacgcctccagagcagcctttggcttacccttcgaaatgtctccgccatttacttttattctcgcttttatgaccgtaatgggaatgacaatagctttcgcgaaagacatttcagatatcgaaggtgatgcgaaatatggggtgtctactgttgctacgaagttaggtgcaagaaatatgacgtttgttgtcagtggtgtcttgttgctgacatacgtaagcgctatacttgcagctatcatttggccgcaagcctttaagtcaaatgtgatgttgttatctcatgccatcctggcgttctgcctaattttccaaactagagagctagcgcttgcaaattatgcttctgcacctagtaggcagttttttgaatttatctggaaattgcattatgcagagtacttagtttatgttttcatc

SEQ ID NO: 398 - DNA, 2031 bp, Artificial Sequence
  Synthetic
atggcttcagaaaaagaaattaggagagagagattcttgaacgttttccctaaattagtagaggaattgaacgcatcgcttttggcttacggtatgcctaaggaagcatgtgactggtatgcccactcattgaactacaacactccaggcggtaagctaaatagaggtttgtccgttgtggacacgtatgctattctctccaacaagaccgttgaacaattggggcaagaagaatacgaaaaggttgccattctaggttggtgcattgagttgttgcaggcttactggttggtcgccgatgatatgatggacaagtccattaccagaagaggccaaccatgttggtacaaggttcctgaagttggggaaattgccatctgggacgcattcatgttagaggctgctatctacaagcttttgaaatctcacttcagaaacgaaaaatactacatagatatcaccgaattgttccatgaggtcaccttccaaaccgaattgggccaattgatggacttaatcactgcacctgaagacaaagtcgacttgagtaagttctccctaaagaagcactccttcatagttactttcaagactgcttactattctttctacttgcctgtcgcattggccatgtacgttgccggtatcacggatgaaaaggatttgaaacaagccagagatgtcttgattccattgggtgaatacttccaaattcaagatgactacttagactgcttcggtaccccagaacagatcggtaagatcggtacagatatccaagataacaaatgttcttgggtaatcaacaaggcattggaacttgcttccgcagaacaaagaaagactttagacgaaaattacggtaagaaggactcagtcgcagaagccaaatgcaaaaagattttcaatgacttgaaaattgaacagctataccacgaatatgaagagtctattgccaaggatttgaaggccaaaatttctcaggtcgatgagtctcgtggcttcaaagctgatgtcttaactgcgttcttgaacaaagtttacaagagaagcaaaggttctggatcagccgggagcgaccagatagaaggaagtcctcatcacgagtctgataactccattgcgacaaaaatcctgaatttcggtcatacgtgctggaagttacaaaggccctatgtcgtgaaaggtcttatttcgatagcttgtggcttgtttggtcgcgaactatttcataataccaaccttttatcttggtcattgatgctcaaggcattctcatccttaatggtaatcctttcttttaatttctttgctgccgttatgaatcaaatttacgatgttgatattgaccgaattaacaaaccagatttgccactcgttagtggagagatgagtatcgaaactgcatggatactatcgatcattgtcgctctgacaggcttaatattgactattaagcttaattgtggtccgctatttatatcattgtattgcgtatctattttcgctggatttgcatacagcgttcctccaattcgttggaaaagatatcctttcaccaacttcttaataactatcagctcacacgtgggtgttaactttacatgttattacgcctccagagcagcctttggcttacccttcgaaatgtctccgccatttacttttattctcgcttttatgaccgtaatgggaatgacaatagctttcgcgaaagacatttcagatatcgaaggtgatgcgaaatatggggtgtctactgttgctacgaagttaggtgcaagaaatatgacgtttgttgtcagtggtgtcttgttgctgacatacgtaagcgctatacttgcagctatcatttggccgcaagcctttaagtcaaatgtgatgttgttatctcatgccatcctggcgttctgcctaattttccaaactagagagctagcgcttgcaaattatgcttctgcacctagtaggcagttttttgaatttatctggaaattgcattatgcagagtacttagtttatgttttcatc

SEQ ID NO: 399 - DNA, 2031 bp, Artificial Sequence
  Synthetic
atggcttcagaaaaagaaattaggagagagagattcttgaacgttttccctaaattagtagaggaattgaacgcatcgcttttggcttacggtatgcctaaggaagcatgtgactggtatgcccactcattgaactacaacactccaggcggtaagctaaatagaggtttgtccgttgtggacacgtatgctattctctccaacaagaccgttgaacaattggggcaagaagaatacgaaaaggttgccattctaggttggtgcattgagttgttgcaggcttactggttggtcgccgatgatatgatggacaagtccattaccagaagaggccaaccatgttggtacaaggttcctgaagttggggaaattgccatctgggacgcattcatgttagaggctgctatctacaagcttttgaaatctcacttcagaaacgaaaaatactacatagatatcaccgaattgttccatgaggtcaccttccaaaccgaattgggccaattgatggacttaatcactgcacctgaagacaaagtcgacttgagtaagttctccctaaagaagcactccttcatagttactttcaagactgcttactattctttctacttgcctgtcgcattggccatgtacgttgccggtatcacggatgaaaaggatttgaaacaagccagagatgtcttgattccattgggtgaatacttccaaattcaagatgactacttagactgcttcggtaccccagaacagatcggtaagatcggtacagatatccaagataacaaatgttcttgggtaatcaacaaggcattggaacttgcttccgcagaacaaagaaagactttagacgaaaattacggtaagaaggactcagtcgcagaagccaaatgcaaaaagattttcaatgacttgaaaattgaacagctataccacgaatatgaagagtctattgccaaggatttgaaggccaaaatttctcaggtcgatgagtctcgtggcttcaaagctgatgtcttaactgcgttcttgaacaaagtttacaagagaagcaaaggttctggatccgcaggatcagatcaaatagaagggagcccccatcacgagtcggacaacagtatcgcgacaaaaattcttaattttggccatactttctggaagttacagcgtccttacgtagttaaaggtttgatttctatcgcttgcggtttgttcggtaaggaactactccacaatacgaacttgatatcatggtctttaatgtttaaagccttctttgctctggtcccaattctaagtttcaattttttcgcagccgctgtgaatcaaatctatgatgttgagatagataggattaacaagccggatttaccactcgtgtccggagaaatgtctatagagacagcttggatcctgtcgattattgtcgctcttactggcttgatagttaccattaaaatgaaaggtggccctttatttgtgtttatctatatatttggtttattcgcaggttttgcttactctgtacctccaattcgatggaagcagtatccgttcactaactttttgatcaccatttcaagccatgttggactagccttcacatcctactatgcttctagagccgcgcttggtctaccatttgaactgcgcccctcatttagttttataattgcattcatgacagttatggggatgactattgcctttgcaaaggacatttcagatattgaaggagatgcaaaatatggtgtcagaacggtagctactaaattaggtgctagaaatatgacccgtgttgtgtcgggggtgttgctattaaattacttagtcagtattttggcaggaataatctggccccaagcttttaattcaaatgtcatgatcttatcgcacgcaattttggccttctgtctcatctttcaaacgagagaattagcccttgctaactacgcaagtgctccttcccgtcaatttttcgagtttatttggaatctgtattatgcggaatacctggtatacgttttcatt

SEQ ID NO: 400 - DNA, 2031 bp, Artificial Sequence
  Synthetic
atggcttcagaaaaagaaattaggagagagagattcttgaacgttttccctaaattagtagaggaattgaacgcatcgcttttggcttacggtatgcctaaggaagcatgtgactggtatgcccactcattgaactacaacactccaggcggtaagctaaatagaggtttgtccgttgtggacacgtatgctattctctccaacaagaccgttgaacaattggggcaagaagaatacgaaaaggttgccattctaggttggtgcattgagttgttgcaggcttactggttggtcgccgatgatatgatggacaagtccattaccagaagaggccaaccatgttggtacaaggttcctgaagttggggaaattgccatctgggacgcattcatgttagaggctgctatctacaagcttttgaaatctcacttcagaaacgaaaaatactacatagatatcaccgaattgttccatgaggtcaccttccaaaccgaattgggccaattgatggacttaatcactgcacctgaagacaaagtcgacttgagtaagttctccctaaagaagcactccttcatagttactttcaagactgcttactattctttctacttgcctgtcgcattggccatgtacgttgccggtatcacggatgaaaaggatttgaaacaagccagagatgtcttgattccattgggtgaatacttccaaattcaagatgactacttagactgcttcggtaccccagaacagatcggtaagatcggtacagatatccaagataacaaatgttcttgggtaatcaacaaggcattggaacttgcttccgcagaacaaagaaagactttagacgaaaattacggtaagaaggactcagtcgcagaagccaaatgcaaaaagattttcaatgacttgaaaattgaacagctataccacgaatatgaagagtctattgccaaggatttgaaggccaaaatttctcaggtcgatgagtctcgtggcttcaaagctgatgtcttaactgcgttcttgaacaaagtttacaagagaagcaaaggttctggatcagccgggagcgaccagatagaaggaagtcctcatcacgagtctgataactccattgcgacaaaaatcctgaatttcggtcatacgtgctggaagttacaaaggccctatgtcgtgaaaggtttgatttcgatagcttgtggcttgtttggtcgcgaactatttcataataccaaccttttatcttggtcattgatgctcaaggcattctcatccttaatggtaatcctttcttttaatttctttgctgccgttatgaatcaaatttacgatgttgatattgaccgaattaacaaaccagatttgccactcgttagtggagagatgagtatcgaaactgcatggatactatcgatcattgtcgctctgacaggcttaatattgactattaagcttaattgtggtccgctatttatatcattgtattgcgtatctattttcgctggatttgcatacagcgttcctccaattcgttggaaacagtatcctttcaccaacttcttaataactatcagctcacacgtgggtgttaactttacatgttattacgcctccagagcagcctttggcttacccttcgaaatgtctccgccatttacttttattctcgcttttatgaccgtaatgggaatgacaatagctttcgcgaaagacatttcagatatcgaaggtgatgcgaaatatggggtgtctactgttgctacgaagttaggtgcaagaaatatgacgtttgttgtcagtggtgtcttgttgctgacatacgtaagcgctatacttgcagctatcatttggccgcaagcctttaagtcaaatgtgatgttgttatctcatgccatcctggcgttctgcctaattttcagaactagagagctagcgcttgcaaattatgcttctgcacctagtaggcagttttttgaatttatctggaaattgcattatgcagagtacttagtttatgttttcatc

SEQ ID NO: 401 - DNA, 2031 bp, Artificial Sequence
  Synthetic
atggcttcagaaaaagaaattaggagagagagattcttgaacgttttccctaaattagtagaggaattgaacgcatcgcttttggcttacggtatgcctaaggaagcatgtgactggtatgcccactcattgaactacaacactccaggcggtaagctaaatagaggtttgtccgttgtggacacgtatgctattctctccaacaagaccgttgaacaattggggcaagaagaatacgaaaaggttgccattctaggttggtgcattgagttgttgcaggcttactggttggtcgccgatgatatgatggacaagtccattaccagaagaggccaaccatgttggtacaaggttcctgaagttggggaaattgccatctgggacgcattcatgttagaggctgctatctacaagcttttgaaatctcacttcagaaacgaaaaatactacatagatatcaccgaattgttccatgaggtcaccttccaaaccgaattgggccaattgatggacttaatcactgcacctgaagacaaagtcgacttgagtaagttctccctaaagaagcactccttcatagttactttcaagactgcttactattctttctacttgcctgtcgcattggccatgtacgttgccggtatcacggatgaaaaggatttgaaacaagccagagatgtcttgattccattgggtgaatacttccaaattcaagatgactacttagactgcttcggtaccccagaacagatcggtaagatcggtacagatatccaagataacaaatgttcttgggtaatcaacaaggcattggaacttgcttccgcagaacaaagaaagactttagacgaaaattacggtaagaaggactcagtcgcagaagccaaatgcaaaaagattttcaatgacttgaaaattgaacagctataccacgaatatgaagagtctattgccaaggatttgaaggccaaaatttctcaggtcgatgagtctcgtggcttcaaagctgatgtcttaactgcgttcttgaacaaagtttacaagagaagcaaaggttctggatccgcaggatcagatcaaatagaagggagcccccatcacgagtcggacaacagtatcgcgacaaaaattcttaattttggccatactttctggaagttacagcgtccttacgtagttaaaggtctaatttctatcgcttgcggtttgttcggtaaggaactactccacaatacgaacttgatatcatggtctttaatgtttaaagccttctttgctctggtcccaattctaagtttcaattttttcgcagccgttgtcaatcaaatctatgatgttgaaatagataggattaacaagccggatttaccactcgtgtccggagaaatgtctatagagacagcttggatcctgtcgattattgtcgctcttactggcttgatagttaccattaaaatgaaaggtggccctttatttgtgtttatctatatatttggtttgttcgcaggttttgcttactctgtacctccaattcgatggaagcagtatccgttcactaactttttgatcaccatttcaagccatgttggactagccttcacatcctactatgcttctagagccgcgcttggtctaccatttgaactgcgcccctcatttagttttataattgcattcatgacagttatggggatgactattgcctttgcaaaggacatttcagatattgaaggagatgcaaaatatggtgtcagaacggtagctactaaattaggtgctagaaatatgaccagggttgtgtcgggggtgttgctattaaattacttagtcagtattttggcaggaataatctggccccaagcttttaattcaaatgtcatgatcttatcgcacgcaattttggccttctgtctcatctttagaacgagagaattagcccttgctaactacgcaagtgctccttcccgtcaatttttcgagtttatttggttgctgtattatgcggaatacctggtatacgttttcatt

SEQ ID NO: 402 - DNA, 2031 bp, Artificial Sequence
  Synthetic
atggcttcagaaaaagaaattaggagagagagattcttgaacgttttccctaaattagtagaggaattgaacgcatcgcttttggcttacggtatgcctaaggaagcatgtgactggtatgcccactcattgaactacaacactccaggcggtaagctaaatagaggtttgtccgttgtggacacgtatgctattctctccaacaagaccgttgaacaattggggcaagaagaatacgaaaaggttgccattctaggttggtgcattgagttgttgcaggcttactggttggtcgccgatgatatgatggacaagtccattaccagaagaggccaaccatgttggtacaaggttcctgaagttggggaaattgccatctgggacgcattcatgttagaggctgctatctacaagcttttgaaatctcacttcagaaacgaaaaatactacatagatatcaccgaattgttccatgaggtcaccttccaaaccgaattgggccaattgatggacttaatcactgcacctgaagacaaagtcgacttgagtaagttctccctaaagaagcactccttcatagttactttcaagactgcttactattctttctacttgcctgtcgcattggccatgtacgttgccggtatcacggatgaaaaggatttgaaacaagccagagatgtcttgattccattgggtgaatacttccaaattcaagatgactacttagactgcttcggtaccccagaacagatcggtaagatcggtacagatatccaagataacaaatgttcttgggtaatcaacaaggcattggaacttgcttccgcagaacaaagaaagactttagacgaaaattacggtaagaaggactcagtcgcagaagccaaatgcaaaaagattttcaatgacttgaaaattgaacagctataccacgaatatgaagagtctattgccaaggatttgaaggccaaaatttctcaggtcgatgagtctcgtggcttcaaagctgatgtcttaactgcgttcttgaacaaagtttacaagagaagcaaaggttctggatccgcaggatcagatcaaatagaagggagcccccatcacgagtcggacaacagtatcgcgacaaaaattcttaattttggccatacttgttggaagttacagcgtccttacgtagttaaaggtctgatttctatcgcttgcggtttgttcggtaaggaactactccacaatacgaacttgatatcatggtctttaatgtttaaagccttctttgctctggtcccaattctaagtttcaattttttcgcagccgctgtgaatcaaatctatgatgttgaaatagataggattaacaagccggatttaccactcgtgtccggagaaatgtctatagagacagcttggatcctgtcgattattgtcgctcttactggcttgatagttaccattaaaatgaaaggtggccctttatttgtgtttatctatatatttggtctattcgcaggttttgcttactctgtacctccaattcgatggaagcagtatccgttcactaactttttgatcaccatttcaagccatgttggactagccttcacatcctactatgcttctagagccgcgcttggtctaccatttgaactgcgcccctcatttagttttataattgcattcatgacagttatggggatgactattgcctttgcaaaggacatttcagatattgaaggagatgcaaaatatggtgtcagaacggtagctactaaattaggtgctagaaatatgaccagggttgtgtcgggggtgttgctattaaattacttagtcagtattttggcaggaataatctggccccaagcttttaattcaaatgtcatgatcttatcgcacgcaattttggccttctgtctcatctttagaacgagagaattagcccttgctaactacgcaagtgctccttcccgtcaatttttcgagtttatttggaatctgtattatgcggaatacctggtatacgttttcatt

SEQ ID NO: 403 - DNA, 2031 bp, Artificial Sequence
  Synthetic
atggcttcagaaaaagaaattaggagagagagattcttgaacgttttccctaaattagtagaggaattgaacgcatcgcttttggcttacggtatgcctaaggaagcatgtgactggtatgcccactcattgaactacaacactccaggcggtaagctaaatagaggtttgtccgttgtggacacgtatgctattctctccaacaagaccgttgaacaattggggcaagaagaatacgaaaaggttgccattctaggttggtgcattgagttgttgcaggcttactggttggtcgccgatgatatgatggacaagtccattaccagaagaggccaaccatgttggtacaaggttcctgaagttggggaaattgccatctgggacgcattcatgttagaggctgctatctacaagcttttgaaatctcacttcagaaacgaaaaatactacatagatatcaccgaattgttccatgaggtcaccttccaaaccgaattgggccaattgatggacttaatcactgcacctgaagacaaagtcgacttgagtaagttctccctaaagaagcactccttcatagttactttcaagactgcttactattctttctacttgcctgtcgcattggccatgtacgttgccggtatcacggatgaaaaggatttgaaacaagccagagatgtcttgattccattgggtgaatacttccaaattcaagatgactacttagactgcttcggtaccccagaacagatcggtaagatcggtacagatatccaagataacaaatgttcttgggtaatcaacaaggcattggaacttgcttccgcagaacaaagaaagactttagacgaaaattacggtaagaaggactcagtcgcagaagccaaatgcaaaaagattttcaatgacttgaaaattgaacagctataccacgaatatgaagagtctattgccaaggatttgaaggccaaaatttctcaggtcgatgagtctcgtggcttcaaagctgatgtcttaactgcgttcttgaacaaagtttacaagagaagcaaaggttctggatcagccgggagcgaccagatagaaggaagtcctcatcacgagtctgataactccattgcgacaaaaatcctgaatttcggtcatacgtgctggaagttacaaaggccctatgtcgtgaaaggtatgatttcgatagcttgtggcttgtttggtcgcgaactatttcataataccaaccttttatcttggtcattgatgctcaaggcattctcatccttaatggtaatcctttcttttaatttctttgctgccgcaatgaatcaaatttacgatgttgatattgaccgaattaacaaaccagatttgccactcgttagtggagagatgagtatcgaaactgcatggatactatcgatcattgtcgctctgacaggcttaatattgactattaagcttaattgtggtccgctatttatatcattgtattgcgtatctttgttcgctggatttgcatacagcgttcctccaattcgttggaaacagtatcctttcaccaacttcttaataactatcagctcacacgtgggtgttaactttacatgttattacgcctccagagcagcctttggcttacccttcgaaatgtctccgccatttacttttattctcgcttttatgaccgtaatgggaatgacaatagctttcgcgaaagacatttcagatatcgaaggtgatgcgaaatatggggtgagaactgttgctacgaagttaggtgcaagaaatatgacgtttgttgtcagtggtgtcttgttgctgacatacgtaagcgctatacttgcagctatcatttggccgcaagcctttaagtcaaatgtgatgttgttatctcatgccatcctggcgttctgcctaattttccaaactagagagctagcgcttgcaaattatgcttctgcacctagtaggcagttttttgaatttatctggaaattgcattatgcagagtacttagtttatgttttcatc

SEQ ID NO: 404 - DNA, 2031 bp, Artificial Sequence
  Synthetic
atggcttcagaaaaagaaattaggagagagagattcttgaacgttttccctaaattagtagaggaattgaacgcatcgcttttggcttacggtatgcctaaggaagcatgtgactggtatgcccactcattgaactacaacactccaggcggtaagctaaatagaggtttgtccgttgtggacacgtatgctattctctccaacaagaccgttgaacaattggggcaagaagaatacgaaaaggttgccattctaggttggtgcattgagttgttgcaggcttactggttggtcgccgatgatatgatggacaagtccattaccagaagaggccaaccatgttggtacaaggttcctgaagttggggaaattgccatctgggacgcattcatgttagaggctgctatctacaagcttttgaaatctcacttcagaaacgaaaaatactacatagatatcaccgaattgttccatgaggtcaccttccaaaccgaattgggccaattgatggacttaatcactgcacctgaagacaaagtcgacttgagtaagttctccctaaagaagcactccttcatagttactttcaagactgcttactattctttctacttgcctgtcgcattggccatgtacgttgccggtatcacggatgaaaaggatttgaaacaagccagagatgtcttgattccattgggtgaatacttccaaattcaagatgactacttagactgcttcggtaccccagaacagatcggtaagatcggtacagatatccaagataacaaatgttcttgggtaatcaacaaggcattggaacttgcttccgcagaacaaagaaagactttagacgaaaattacggtaagaaggactcagtcgcagaagccaaatgcaaaaagattttcaatgacttgaaaattgaacagctataccacgaatatgaagagtctattgccaaggatttgaaggccaaaatttctcaggtcgatgagtctcgtggcttcaaagctgatgtcttaactgcgttcttgaacaaagtttacaagagaagcaaaggttctggatcagccgggagcgaccagatagaaggaagtcctcatcacgagtctgataactccattgcgacaaaaatcctgaatttcggtcatacgtgctggaagttacaaaggccctatgtcgtgaaaggtctaatttcgatagcttgtggcttgtttggtcgcgaactatttcataataccaaccttttatcttggtcattgatgctcaaggcattctcatccttaatggtaatcctttcttttaatttctttgctgccgttatgaatcaaatttacgatgttgatattgaccgaattaacaaaccagatttgccactcgttagtggagagatgagtatcgaaactgcatggatactatcgatcattgtcgctctgacaggcttaatattgactattaagcttaattgtggtccgctatttatatcattgtattgcgtatctattttcgctggatttgcatacagcgttcctccaattcgttggaaacagtatcctttcaccaacttcttaataactatcagctcacacgtgggtgttaactttacatgttattacgcctccagagcagcctttggcttacccttcgaaatgtctccgccatttacttttattctcgcttttatgaccgtaatgggaatgacaatagctttcgcgaaagacatttcagatatcgaaggtgatgcgaaatatggggtgtctactgttgctacgaagttaggtgcaagaaatatgacgtttgttgtcagtggtgtcttgttgctgacatacgtaagcgctatacttgcagctatcatttggccgcaagcctttaagtcaaatgtgatgttgttatctcatgccatcctggcgttctgcctaattttccaaactagagagctagcgcttgcaaattatgcttctgcacctagtaggcagttttttgaatttatctggaaattgcattatgcagagtacttagtttatgttttcatc

SEQ ID NO: 405 - DNA, 2031 bp, Artificial Sequence
  Synthetic
atggcttcagaaaaagaaattaggagagagagattcttgaacgttttccctaaattagtagaggaattgaacgcatcgcttttggcttacggtatgcctaaggaagcatgtgactggtatgcccactcattgaactacaacactccaggcggtaagctaaatagaggtttgtccgttgtggacacgtatgctattctctccaacaagaccgttgaacaattggggcaagaagaatacgaaaaggttgccattctaggttggtgcattgagttgttgcaggcttactggttggtcgccgatgatatgatggacaagtccattaccagaagaggccaaccatgttggtacaaggttcctgaagttggggaaattgccatctgggacgcattcatgttagaggctgctatctacaagcttttgaaatctcacttcagaaacgaaaaatactacatagatatcaccgaattgttccatgaggtcaccttccaaaccgaattgggccaattgatggacttaatcactgcacctgaagacaaagtcgacttgagtaagttctccctaaagaagcactccttcatagttactttcaagactgcttactattctttctacttgcctgtcgcattggccatgtacgttgccggtatcacggatgaaaaggatttgaaacaagccagagatgtcttgattccattgggtgaatacttccaaattcaagatgactacttagactgcttcggtaccccagaacagatcggtaagatcggtacagatatccaagataacaaatgttcttgggtaatcaacaaggcattggaacttgcttccgcagaacaaagaaagactttagacgaaaattacggtaagaaggactcagtcgcagaagccaaatgcaaaaagattttcaatgacttgaaaattgaacagctataccacgaatatgaagagtctattgccaaggatttgaaggccaaaatttctcaggtcgatgagtctcgtggcttcaaagctgatgtcttaactgcgttcttgaacaaagtttacaagagaagcaaaggttctggatccgcaggatcagatcaaatagaagggagcccccatcacgagtcggacaacagtatcgcgacaaaaattcttaattttggccatactttctggaagttacagcgtccttacgtagttaaaggtttgatttctatcgcttgcggtttgttcggtaaggaactactccacaatacgaacttgatatcatggtctttaatgtttaaagccttctttgctctggtcccaattctaagtttcaattttttcgcagccgctgtgaatcaaatctatgatgttgaaatagataggattaacaagccggatttaccactcgtgtccggagaaatgtctatagagacagcttggatcctgtcgattattgtcgctcttactggcttgatagttaccattaaaatgaaaggtggccctttatttgtgtttatctatatatttggtttattcgcaggttttgcttactctgtacctccaattcgatggaagcagtatccgttcactaactttttgatcaccatttcaagccatgttggactagccttcacatcctactatgcttctagagccgcgcttggtctaccatttgaactgcgcccctcatttagttttataattgcattcatgacagttatggggatgactattgcctttgcaaaggacatttcagatattgaaggagatgcaaaatatggtgtcagaacggtagctactaaattaggtgctagaaatatgaccttcgttgtgtcgggggtgttgctattaaattacttagtcagtattttggcaggaataatctggccccaagcttttaattcaaatgtcatgatcttatcgcacgcaattttggccttctgtctcatctttaggacgagagaattagcccttgctaactacgcaagtgctccttcccgtcaatttttcgagtttatttggaacctgtattatgcggaatacctggtatacgttttcatt

SEQ ID NO: 406 - DNA, 2031 bp, Artificial Sequence
  Synthetic
atggcttcagaaaaagaaattaggagagagagattcttgaacgttttccctaaattagtagaggaattgaacgcatcgcttttggcttacggtatgcctaaggaagcatgtgactggtatgcccactcattgaactacaacactccaggcggtaagctaaatagaggtttgtccgttgtggacacgtatgctattctctccaacaagaccgttgaacaattggggcaagaagaatacgaaaaggttgccattctaggttggtgcattgagttgttgcaggcttactggttggtcgccgatgatatgatggacaagtccattaccagaagaggccaaccatgttggtacaaggttcctgaagttggggaaattgccatctgggacgcattcatgttagaggctgctatctacaagcttttgaaatctcacttcagaaacgaaaaatactacatagatatcaccgaattgttccatgaggtcaccttccaaaccgaattgggccaattgatggacttaatcactgcacctgaagacaaagtcgacttgagtaagttctccctaaagaagcactccttcatagttactttcaagactgcttactattctttctacttgcctgtcgcattggccatgtacgttgccggtatcacggatgaaaaggatttgaaacaagccagagatgtcttgattccattgggtgaatacttccaaattcaagatgactacttagactgcttcggtaccccagaacagatcggtaagatcggtacagatatccaagataacaaatgttcttgggtaatcaacaaggcattggaacttgcttccgcagaacaaagaaagactttagacgaaaattacggtaagaaggactcagtcgcagaagccaaatgcaaaaagattttcaatgacttgaaaattgaacagctataccacgaatatgaagagtctattgccaaggatttgaaggccaaaatttctcaggtcgatgagtctcgtggcttcaaagctgatgtcttaactgcgttcttgaacaaagtttacaagagaagcaaaggttctggatcagccgggagcgaccagatagaaggaagtcctcatcacgagtctgataactccattgcgacaaaaatcctgaatttcggtcatacgtgctggaagttacaaaggccctatgtcgtgaaaggtatgatttcgatagcttgtggcttgtttggtcgcgaactatttcataataccaaccttttatcttggtcattgatgctcaaggcattctcatccttaatggtaatcctttcttttaatttctttgctgccgcgatgaatcaaatttacgatgttgatattgaccgaattaacaaaccagatttgccactcgttagtggagagatgagtatcgaaactgcatggatactatcgatcattgtcgctctgacaggcttaatattgactattaagcttaattgtggtccgctatttatatcattgtattgcgtatctttattcgctggatttgcatacagcgttcctccaattcgttggaaaagatatcctttcaccaacttcttaataactatcagctcacacgtgggtgttaactttacatgttattacgcctccagagcagcctttggcttacccttcgaaatgtctccgccatttacttttattctcgcttttatgaccgtaatgggaatgacaatagctttcgcgaaagacatttcagatatcgaaggtgatgcgaaatatggggtgtctactgttgctacgaagttaggtgcaagaaatatgacgtttgttgtcagtggtgtcttgttgctgacatacgtaagcgctatacttgcagctatcatttggccgcaagcctttaagtcaaatgtgatgttgttatctcatgccatcctggcgttctgcctaattttccaaactagagagctagcgcttgcaaattatgcttctgcacctagtaggcagttttttgaatttatctggaaattgcattatgcagagtacttagtttatgttttcatc

SEQ ID NO: 407 - DNA, 2031 bp, Artificial Sequence
  Synthetic
atggcttcagaaaaagaaattaggagagagagattcttgaacgttttccctaaattagtagaggaattgaacgcatcgcttttggcttacggtatgcctaaggaagcatgtgactggtatgcccactcattgaactacaacactccaggcggtaagctaaatagaggtttgtccgttgtggacacgtatgctattctctccaacaagaccgttgaacaattggggcaagaagaatacgaaaaggttgccattctaggttggtgcattgagttgttgcaggcttactggttggtcgccgatgatatgatggacaagtccattaccagaagaggccaaccatgttggtacaaggttcctgaagttggggaaattgccatctgggacgcattcatgttagaggctgctatctacaagcttttgaaatctcacttcagaaacgaaaaatactacatagatatcaccgaattgttccatgaggtcaccttccaaaccgaattgggccaattgatggacttaatcactgcacctgaagacaaagtcgacttgagtaagttctccctaaagaagcactccttcatagttactttcaagactgcttactattctttctacttgcctgtcgcattggccatgtacgttgccggtatcacggatgaaaaggatttgaaacaagccagagatgtcttgattccattgggtgaatacttccaaattcaagatgactacttagactgcttcggtaccccagaacagatcggtaagatcggtacagatatccaagataacaaatgttcttgggtaatcaacaaggcattggaacttgcttccgcagaacaaagaaagactttagacgaaaattacggtaagaaggactcagtcgcagaagccaaatgcaaaaagattttcaatgacttgaaaattgaacagctataccacgaatatgaagagtctattgccaaggatttgaaggccaaaatttctcaggtcgatgagtctcgtggcttcaaagctgatgtcttaactgcgttcttgaacaaagtttacaagagaagcaaaggttctggatcagccgggagcgaccagatagaaggaagtcctcatcacgagtctgataactccattgcgacaaaaatcctgaatttcggtcatacgtgctggaagttacaaaggccctatgtcgtgaaaggtatgatttcgatagcttgtggcttgtttggtcgcgaactatttcataataccaaccttttatcttggtcattgatgctcaaggcattctcatccttaatggtaatcctttcttttaatttctttgctgccgcaatgaatcaaatttacgatgttgatattgaccgaattaacaaaccagatttgccactcgttagtggagagatgagtatcgaaactgcatggatactatcgatcattgtcgctctgacaggcttaatattgactattaagcttaattgtggtccgctatttatatcattgtattgcgtatctttattcgctggatttgcatacagcgttcctccaattcgttggaaacagtatcctttcaccaacttcttaataactatcagctcacacgtgggtgttaactttacatgttattacgcctccagagcagcctttggcttacccttcgaaatgtctccgccatttacttttattctcgcttttatgaccgtaatgggaatgacaatagctttcgcgaaagacatttcagatatcgaaggtgatgcgaaatatggggtgtctactgttgctacgaagttaggtgcaagaaatatgacgtttgttgtcagtggtgtcttgttgctgacatacgtaagcgctatacttgcagctatcatttggccgcaagcctttaagtcaaatgtgatgttgttatctcatgccatcctggcgttctgcctaattttccaaactagagagctagcgcttgcaaattatgcttctgcacctagtaggcagttttttgaatttatctggaaattgcattatgcagagtacttagtttatgttttcatc

SEQ ID NO: 408 - DNA, 2031 bp, Artificial Sequence
  Synthetic
atggcttcagaaaaagaaattaggagagagagattcttgaacgttttccctaaattagtagaggaattgaacgcatcgcttttggcttacggtatgcctaaggaagcatgtgactggtatgcccactcattgaactacaacactccaggcggtaagctaaatagaggtttgtccgttgtggacacgtatgctattctctccaacaagaccgttgaacaattggggcaagaagaatacgaaaaggttgccattctaggttggtgcattgagttgttgcaggcttactggttggtcgccgatgatatgatggacaagtccattaccagaagaggccaaccatgttggtacaaggttcctgaagttggggaaattgccatctgggacgcattcatgttagaggctgctatctacaagcttttgaaatctcacttcagaaacgaaaaatactacatagatatcaccgaattgttccatgaggtcaccttccaaaccgaattgggccaattgatggacttaatcactgcacctgaagacaaagtcgacttgagtaagttctccctaaagaagcactccttcatagttactttcaagactgcttactattctttctacttgcctgtcgcattggccatgtacgttgccggtatcacggatgaaaaggatttgaaacaagccagagatgtcttgattccattgggtgaatacttccaaattcaagatgactacttagactgcttcggtaccccagaacagatcggtaagatcggtacagatatccaagataacaaatgttcttgggtaatcaacaaggcattggaacttgcttccgcagaacaaagaaagactttagacgaaaattacggtaagaaggactcagtcgcagaagccaaatgcaaaaagattttcaatgacttgaaaattgaacagctataccacgaatatgaagagtctattgccaaggatttgaaggccaaaatttctcaggtcgatgagtctcgtggcttcaaagctgatgtcttaactgcgttcttgaacaaagtttacaagagaagcaaaggttctggatccgcaggatcagatcaaatagaagggagcccccatcacgagtcggacaacagtatcgcgacaaaaattcttaattttggccatactttctggaagttacagcgtccttacgtagttaaaggtctaatttctatcgcttgcggtttgttcggtaaggaactactccacaatacgaacttgatatcatggtctttaatgtttaaagccttctttgctctggtcccaattctaagtttcaattttttcgcagccgttgtgaatcaaatctatgatgttgaaatagataggattaacaagccggatttaccactcgtgtccggagaaatgtctatagagacagcttggatcctgtcgattattgtcgctcttactggcttgatagttaccattaaaatgaaaggtggccctttatttgtgtttatctatatatttggtttgttcgcaggttttgcttactctgtacctccaattcgatggaagcagtatccgttcactaactttttgatcaccatttcaagccatgttggactagccttcacatcctactatgcttctagagccgcgcttggtctaccatttgaactgcgcccctcatttagttttataattgcattcatgacagttatggggatgactattgcctttgcaaaggacatttcagatattgaaggagatgcaaaatatggtgtcagaacggtagctactaaattaggtgctagaaatatgaccttcgttgtgtcgggggtgttgctattaaattacttagtcagtattttggcaggaataatctggccccaagcttttaattcaaatgtcatgatcttatcgcacgcaattttggccttctgtctcatctttaggacgagagaattagcccttgctaactacgcaagtgctccttcccgtcaatttttcgagtttatttggagactgtattatgcggaatacctggtatacgttttcatt

SEQ ID NO: 409 - DNA, 2031 bp, Artificial Sequence
  Synthetic
atggcttcagaaaaagaaattaggagagagagattcttgaacgttttccctaaattagtagaggaattgaacgcatcgcttttggcttacggtatgcctaaggaagcatgtgactggtatgcccactcattgaactacaacactccaggcggtaagctaaatagaggtttgtccgttgtggacacgtatgctattctctccaacaagaccgttgaacaattggggcaagaagaatacgaaaaggttgccattctaggttggtgcattgagttgttgcaggcttactggttggtcgccgatgatatgatggacaagtccattaccagaagaggccaaccatgttggtacaaggttcctgaagttggggaaattgccatctgggacgcattcatgttagaggctgctatctacaagcttttgaaatctcacttcagaaacgaaaaatactacatagatatcaccgaattgttccatgaggtcaccttccaaaccgaattgggccaattgatggacttaatcactgcacctgaagacaaagtcgacttgagtaagttctccctaaagaagcactccttcatagttactttcaagactgcttactattctttctacttgcctgtcgcattggccatgtacgttgccggtatcacggatgaaaaggatttgaaacaagccagagatgtcttgattccattgggtgaatacttccaaattcaagatgactacttagactgcttcggtaccccagaacagatcggtaagatcggtacagatatccaagataacaaatgttcttgggtaatcaacaaggcattggaacttgcttccgcagaacaaagaaagactttagacgaaaattacggtaagaaggactcagtcgcagaagccaaatgcaaaaagattttcaatgacttgaaaattgaacagctataccacgaatatgaagagtctattgccaaggatttgaaggccaaaatttctcaggtcgatgagtctcgtggcttcaaagctgatgtcttaactgcgttcttgaacaaagtttacaagagaagcaaaggttctggatccgcaggatcagatcaaatagaagggagcccccatcacgagtcggacaacagtatcgcgacaaaaattcttaattttggccatactttctggaagttacagcgtccttacgtagttaaaggtctgatttctatcgcttgcggtttgttcggtaaggaactactccacaatacgaacttgatatcatggtctttaatgtttaaagccttctttgctctggtcccaattctaagtttcaattttttcgcagccgcgatgaatcaaatctatgatgttgaaatagataggattaacaagccggatttaccactcgtgtccggagaaatgtctatagagacagcttggatcctgtcgattattgtcgctcttactggcttgatagttaccattaaaatgaaaggtggccctttatttgtgtttatctatatatttggtttgttcgcaggttttgcttactctgtacctccaattcgatggaagcagtatccgttcactaactttttgatcaccatttcaagccatgttggactagccttcacatcctactatgcttctagagccgcgcttggtctaccatttgaactgcgcccctcatttagttttataattgcattcatgacagttatggggatgactattgcctttgcaaaggacatttcagatattgaaggagatgcaaaatatggtgtccggacggtagctactaaattaggtgctagaaatatgaccagagttgtgtcgggggtgttgctattaaattacttagtcagtattttggcaggaataatctggccccaagcttttaattcaaatgtcatgatcttatcgcacgcaattttggccttctgtctcatctttaggacgagagaattagcccttgctaactacgcaagtgctccttcccgtcaatttttcgagtttatttggaacctgtattatgcggaatacctggtatacgttttcatt

SEQ ID NO: 410 - DNA, 2031 bp, Artificial Sequence
  Synthetic
atggcttcagaaaaagaaattaggagagagagattcttgaacgttttccctaaattagtagaggaattgaacgcatcgcttttggcttacggtatgcctaaggaagcatgtgactggtatgcccactcattgaactacaacactccaggcggtaagctaaatagaggtttgtccgttgtggacacgtatgctattctctccaacaagaccgttgaacaattggggcaagaagaatacgaaaaggttgccattctaggttggtgcattgagttgttgcaggcttactggttggtcgccgatgatatgatggacaagtccattaccagaagaggccaaccatgttggtacaaggttcctgaagttggggaaattgccatctgggacgcattcatgttagaggctgctatctacaagcttttgaaatctcacttcagaaacgaaaaatactacatagatatcaccgaattgttccatgaggtcaccttccaaaccgaattgggccaattgatggacttaatcactgcacctgaagacaaagtcgacttgagtaagttctccctaaagaagcactccttcatagttactttcaagactgcttactattctttctacttgcctgtcgcattggccatgtacgttgccggtatcacggatgaaaaggatttgaaacaagccagagatgtcttgattccattgggtgaatacttccaaattcaagatgactacttagactgcttcggtaccccagaacagatcggtaagatcggtacagatatccaagataacaaatgttcttgggtaatcaacaaggcattggaacttgcttccgcagaacaaagaaagactttagacgaaaattacggtaagaaggactcagtcgcagaagccaaatgcaaaaagattttcaatgacttgaaaattgaacagctataccacgaatatgaagagtctattgccaaggatttgaaggccaaaatttctcaggtcgatgagtctcgtggcttcaaagctgatgtcttaactgcgttcttgaacaaagtttacaagagaagcaaaggttctggatcagccgggagcgaccagatagaaggaagtcctcatcacgagtctgataactccattgcgacaaaaatcctgaatttcggtcatacgtgctggaagttacaaaggccctatgtcgtgaaaggtatgatttcgatagcttgtggcttgtttggtcgcgaactatttcataataccaaccttttatcttggtcattgatgctcaaggcattctcatccttaatggtaatcctttcttttaatttctttgctgccgcaatgaatcaaatttacgatgttgatattgaccgaattaacaaaccagatttgccactcgttagtggagagatgagtatcgaaactgcatggatactatcgatcattgtcgctctgacaggcttaatattgactattaagcttaattgtggtccgctatttatatcattgtattgcgtatctttattcgctggatttgcatacagcgttcctccaattcgttggaaacagtatcctttcaccaacttcttaataactatcagctcacacgtgggtgttaactttacatgttattacgcctccagagcagcctttggcttacccttcgaaatgtctccgccatttacttttattctcgcttttatgaccgtaatgggaatgacaatagctttcgcgaaagacatttcagatatcgaaggtgatgcgaaatatggggtgtctactgttgctacgaagttaggtgcaagaaatatgacgtttgttgtcagtggtgtcttgttgctgacatacgtaagcgctatacttgcagctatcatttggccgcaagcctttaagtcaaatgtgatgttgttatctcatgccatcctggcgttctgcctaattttcagaactagagagctagcgcttgcaaattatgcttctgcacctagtaggcagttttttgaatttatctggaaattgcattatgcagagtacttagtttatgttttcatc

SEQ ID NO: 411 - DNA, 2031 bp, Artificial Sequence
  Synthetic
atggcttcagaaaaagaaattaggagagagagattcttgaacgttttccctaaattagtagaggaattgaacgcatcgcttttggcttacggtatgcctaaggaagcatgtgactggtatgcccactcattgaactacaacactccaggcggtaagctaaatagaggtttgtccgttgtggacacgtatgctattctctccaacaagaccgttgaacaattggggcaagaagaatacgaaaaggttgccattctaggttggtgcattgagttgttgcaggcttactggttggtcgccgatgatatgatggacaagtccattaccagaagaggccaaccatgttggtacaaggttcctgaagttggggaaattgccatctgggacgcattcatgttagaggctgctatctacaagcttttgaaatctcacttcagaaacgaaaaatactacatagatatcaccgaattgttccatgaggtcaccttccaaaccgaattgggccaattgatggacttaatcactgcacctgaagacaaagtcgacttgagtaagttctccctaaagaagcactccttcatagttactttcaagactgcttactattctttctacttgcctgtcgcattggccatgtacgttgccggtatcacggatgaaaaggatttgaaacaagccagagatgtcttgattccattgggtgaatacttccaaattcaagatgactacttagactgcttcggtaccccagaacagatcggtaagatcggtacagatatccaagataacaaatgttcttgggtaatcaacaaggcattggaacttgcttccgcagaacaaagaaagactttagacgaaaattacggtaagaaggactcagtcgcagaagccaaatgcaaaaagattttcaatgacttgaaaattgaacagctataccacgaatatgaagagtctattgccaaggatttgaaggccaaaatttctcaggtcgatgagtctcgtggcttcaaagctgatgtcttaactgcgttcttgaacaaagtttacaagagaagcaaaggttctggatcagccgggagcgaccagatagaaggaagtcctcatcacgagtctgataactccattgcgacaaaaatcctgaatttcggtcatacgtgctggaagttacaaaggccctatgtcgtgaaaggtatgatttcgatagcttgtggcttgtttggtcgcgaactatttcataataccaaccttttatcttggtcattgatgctcaaggcattctcatccttaatggtaatcctttcttttaatttctttgctgccgcaatgaatcaaatttacgatgttgatattgaccgaattaacaaaccagatttgccactcgttagtggagagatgagtatcgaaactgcatggatactatcgatcattgtcgctctgacaggcttaatattgactattaagcttaattgtggtccgctatttatatcattgtattgcgtatctattttcgctggatttgcatacagcgttcctccaattcgttggaaacagtatcctttcaccaacttcttaataactatcagctcacacgtgggtgttaactttacatgttattacgcctccagagcagcctttggcttacccttcgaaatgtctccgccatttacttttattctcgcttttatgaccgtaatgggaatgacaatagctttcgcgaaagacatttcagatatcgaaggtgatgcgaaatatggggtgagaactgttgctacgaagttaggtgcaagaaatatgacgtttgttgtcagtggtgtcttgttgctgacatacgtaagcgctatacttgcagctatcatttggccgcaagcctttaagtcaaatgtgatgttgttatctcatgccatcctggcgttctgcctaattttccaaactagagagctagcgcttgcaaattatgcttctgcacctagtaggcagttttttgaatttatctggaaattgcattatgcagagtacttagtttatgttttcatc

SEQ ID NO: 412 - DNA, 2031 bp, Artificial Sequence
  Synthetic
atggcttcagaaaaagaaattaggagagagagattcttgaacgttttccctaaattagtagaggaattgaacgcatcgcttttggcttacggtatgcctaaggaagcatgtgactggtatgcccactcattgaactacaacactccaggcggtaagctaaatagaggtttgtccgttgtggacacgtatgctattctctccaacaagaccgttgaacaattggggcaagaagaatacgaaaaggttgccattctaggttggtgcattgagttgttgcaggcttactggttggtcgccgatgatatgatggacaagtccattaccagaagaggccaaccatgttggtacaaggttcctgaagttggggaaattgccatctgggacgcattcatgttagaggctgctatctacaagcttttgaaatctcacttcagaaacgaaaaatactacatagatatcaccgaattgttccatgaggtcaccttccaaaccgaattgggccaattgatggacttaatcactgcacctgaagacaaagtcgacttgagtaagttctccctaaagaagcactccttcatagttactttcaagactgcttactattctttctacttgcctgtcgcattggccatgtacgttgccggtatcacggatgaaaaggatttgaaacaagccagagatgtcttgattccattgggtgaatacttccaaattcaagatgactacttagactgcttcggtaccccagaacagatcggtaagatcggtacagatatccaagataacaaatgttcttgggtaatcaacaaggcattggaacttgcttccgcagaacaaagaaagactttagacgaaaattacggtaagaaggactcagtcgcagaagccaaatgcaaaaagattttcaatgacttgaaaattgaacagctataccacgaatatgaagagtctattgccaaggatttgaaggccaaaatttctcaggtcgatgagtctcgtggcttcaaagctgatgtcttaactgcgttcttgaacaaagtttacaagagaagcaaaggttctggatccgcaggatcagatcaaatagaagggagcccccatcacgagtcggacaacagtatcgcgacaaaaattcttaattttggccatactttctggaagttacagcgtccttacgtagttaaaggtttgatttctatcgcttgcggtttgttcggtaaggaactactccacaatacgaacttgatatcatggtctttaatgtttaaagccttctttgctctggtcccaattctaagtttcaattttttcgcagccgctgtgaatcaaatctatgatgttgacatagataggattaacaagccggatttaccactcgtgtccggagaaatgtctatagagacagcttggatcctgtcgattattgtcgctcttactggcttgatagttaccattaaaatgaaaggtggccctttatttgtgtttatctatatatttggtctattcgcaggttttgcttactctgtacctccaattcgatggaagcagtatccgttcactaactttttgatcaccatttcaagccatgttggactagccttcacatcctactatgcttctagagccgcgcttggtctaccatttgaactgcgcccctcatttagttttataattgcattcatgacagttatggggatgactattgcctttgcaaaggacatttcagatattgaaggagatgcaaaatatggtgtcagaacggtagctactaaattaggtgctagaaatatgaccagggttgtgtcgggggtgttgctattaaattacttagtcagtattttggcaggaataatctggccccaagcttttaattcaaatgtcatgatcttatcgcacgcaattttggccttctgtctcatctttcgcacgagagaattagcccttgctaactacgcaagtgctccttcccgtcaatttttcgagtttatttggaacctgtattatgcggaatacctggtatacgttttcatt

SEQ ID NO: 413 - DNA, 2031 bp, Artificial Sequence
  Synthetic
atggcttcagaaaaagaaattaggagagagagattcttgaacgttttccctaaattagtagaggaattgaacgcatcgcttttggcttacggtatgcctaaggaagcatgtgactggtatgcccactcattgaactacaacactccaggcggtaagctaaatagaggtttgtccgttgtggacacgtatgctattctctccaacaagaccgttgaacaattggggcaagaagaatacgaaaaggttgccattctaggttggtgcattgagttgttgcaggcttactggttggtcgccgatgatatgatggacaagtccattaccagaagaggccaaccatgttggtacaaggttcctgaagttggggaaattgccatctgggacgcattcatgttagaggctgctatctacaagcttttgaaatctcacttcagaaacgaaaaatactacatagatatcaccgaattgttccatgaggtcaccttccaaaccgaattgggccaattgatggacttaatcactgcacctgaagacaaagtcgacttgagtaagttctccctaaagaagcactccttcatagttactttcaagactgcttactattctttctacttgcctgtcgcattggccatgtacgttgccggtatcacggatgaaaaggatttgaaacaagccagagatgtcttgattccattgggtgaatacttccaaattcaagatgactacttagactgcttcggtaccccagaacagatcggtaagatcggtacagatatccaagataacaaatgttcttgggtaatcaacaaggcattggaacttgcttccgcagaacaaagaaagactttagacgaaaattacggtaagaaggactcagtcgcagaagccaaatgcaaaaagattttcaatgacttgaaaattgaacagctataccacgaatatgaagagtctattgccaaggatttgaaggccaaaatttctcaggtcgatgagtctcgtggcttcaaagctgatgtcttaactgcgttcttgaacaaagtttacaagagaagcaaaggttctggatcagccgggagcgaccagatagaaggaagtcctcatcacgagtctgataactccattgcgacaaaaatcctgaatttcggtcatacgtgctggaagttacaaaggccctatgtcgtgaaaggtatgatttcgatagcttgtggcttgtttggtcgcgaactatttcataataccaaccttttatcttggtcattgatgctcaaggcattctcatccttaatggtaatcctttcttttaatttctttgctgccgcaatgaatcaaatttacgatgttgatattgaccgaattaacaaaccagatttgccactcgttagtggagagatgagtatcgaaactgcatggatactatcgatcattgtcgctctgacaggcttaatattgactattaagcttaattgtggtccgctatttatatcattgtattgcgtatctattttcgctggatttgcatacagcgttcctccaattcgttggaaacagtatcctttcaccaacttcttaataactatcagctcacacgtgggtgttaactttacatgttattacgcctccagagcagcctttggcttacccttcgaaatgtctccgccatttacttttattctcgcttttatgaccgtaatgggaatgacaatagctttcgcgaaagacatttcagatatcgaaggtgatgcgaaatatggggtgagaactgttgctacgaagttaggtgcaagaaatatgacgtttgttgtcagtggtgtcttgttgctgacatacgtaagcgctatacttgcagctatcatttggccgcaagcctttaagtcaaatgtgatgttgttatctcatgccatcctggcgttctgcctaattttcaggactagagagctagcgcttgcaaattatgcttctgcacctagtaggcagttttttgaatttatctggaaattgcattatgcagagtacttagtttatgttttcatc

SEQ ID NO: 414 - DNA, 2031 bp, Artificial Sequence
  Synthetic
atggcttcagaaaaagaaattaggagagagagattcttgaacgttttccctaaattagtagaggaattgaacgcatcgcttttggcttacggtatgcctaaggaagcatgtgactggtatgcccactcattgaactacaacactccaggcggtaagctaaatagaggtttgtccgttgtggacacgtatgctattctctccaacaagaccgttgaacaattggggcaagaagaatacgaaaaggttgccattctaggttggtgcattgagttgttgcaggcttactggttggtcgccgatgatatgatggacaagtccattaccagaagaggccaaccatgttggtacaaggttcctgaagttggggaaattgccatctgggacgcattcatgttagaggctgctatctacaagcttttgaaatctcacttcagaaacgaaaaatactacatagatatcaccgaattgttccatgaggtcaccttccaaaccgaattgggccaattgatggacttaatcactgcacctgaagacaaagtcgacttgagtaagttctccctaaagaagcactccttcatagttactttcaagactgcttactattctttctacttgcctgtcgcattggccatgtacgttgccggtatcacggatgaaaaggatttgaaacaagccagagatgtcttgattccattgggtgaatacttccaaattcaagatgactacttagactgcttcggtaccccagaacagatcggtaagatcggtacagatatccaagataacaaatgttcttgggtaatcaacaaggcattggaacttgcttccgcagaacaaagaaagactttagacgaaaattacggtaagaaggactcagtcgcagaagccaaatgcaaaaagattttcaatgacttgaaaattgaacagctataccacgaatatgaagagtctattgccaaggatttgaaggccaaaatttctcaggtcgatgagtctcgtggcttcaaagctgatgtcttaactgcgttcttgaacaaagtttacaagagaagcaaaggttctggatcagccgggagcgaccagatagaaggaagtcctcatcacgagtctgataactccattgcgacaaaaatcctgaatttcggtcatacgtgctggaagttacaaaggccctatgtcgtgaaaggtatgatttcgatagcttgtggcttgtttggtcgcgaactatttcataataccaaccttttatcttggtcattgatgctcaaggcattctcatccttaatggtaatcctttcttttaatttctttgctgccgcaatgaatcaaatttacgatgttgatattgaccgaattaacaaaccagatttgccactcgttagtggagagatgagtatcgaaactgcatggatactatcgatcattgtcgctctgacaggcttaatattgactattaagcttaattgtggtccgctatttatatcattgtattgcgtatctattttcgctggatttgcatacagcgttcctccaattcgttggaaacggtatcctttcaccaacttcttaataactatcagctcacacgtgggtgttaactttacatgttattacgcctccagagcagcctttggcttacccttcgaaatgtctccgccatttacttttattctcgcttttatgaccgtaatgggaatgacaatagctttcgcgaaagacatttcagatatcgaaggtgatgcgaaatatggggtgtctactgttgctacgaagttaggtgcaagaaatatgacgtttgttgtcagtggtgtcttgttgctgacatacgtaagcgctatacttgcagctatcatttggccgcaagcctttaagtcaaatgtgatgttgttatctcatgccatcctggcgttctgcctaattttccaaactagagagctagcgcttgcaaattatgcttctgcacctagtaggcagttttttgaatttatctggaaattgcattatgcagagtacttagtttatgttttcatc

SEQ ID NO: 415 - DNA, 2031 bp, Artificial Sequence
  Synthetic
atggcttcagaaaaagaaattaggagagagagattcttgaacgttttccctaaattagtagaggaattgaacgcatcgcttttggcttacggtatgcctaaggaagcatgtgactggtatgcccactcattgaactacaacactccaggcggtaagctaaatagaggtttgtccgttgtggacacgtatgctattctctccaacaagaccgttgaacaattggggcaagaagaatacgaaaaggttgccattctaggttggtgcattgagttgttgcaggcttactggttggtcgccgatgatatgatggacaagtccattaccagaagaggccaaccatgttggtacaaggttcctgaagttggggaaattgccatctgggacgcattcatgttagaggctgctatctacaagcttttgaaatctcacttcagaaacgaaaaatactacatagatatcaccgaattgttccatgaggtcaccttccaaaccgaattgggccaattgatggacttaatcactgcacctgaagacaaagtcgacttgagtaagttctccctaaagaagcactccttcatagttactttcaagactgcttactattctttctacttgcctgtcgcattggccatgtacgttgccggtatcacggatgaaaaggatttgaaacaagccagagatgtcttgattccattgggtgaatacttccaaattcaagatgactacttagactgcttcggtaccccagaacagatcggtaagatcggtacagatatccaagataacaaatgttcttgggtaatcaacaaggcattggaacttgcttccgcagaacaaagaaagactttagacgaaaattacggtaagaaggactcagtcgcagaagccaaatgcaaaaagattttcaatgacttgaaaattgaacagctataccacgaatatgaagagtctattgccaaggatttgaaggccaaaatttctcaggtcgatgagtctcgtggcttcaaagctgatgtcttaactgcgttcttgaacaaagtttacaagagaagcaaaggttctggatccgcaggatcagatcaaatagaagggagcccccatcacgagtcggacaacagtatcgcgacaaaaattcttaattttggccatactttctggaagttacagcgtccttacgtagttaaaggtttgatttctatcgcttgcggtttgttcggtaaggaactactccacaatacgaacttgatatcatggtctttaatgtttaaagccttctttgctctggtcccaattctaagtttcaattttttcgcagccgttgtgaatcaaatctatgatgttgacatagataggattaacaagccggatttaccactcgtgtccggagaaatgtctatagagacagcttggatcctgtcgattattgtcgctcttactggcttgatagttaccattaaaatgaaaggtggccctttatttgtgtttatctatatatttggtctgttcgcaggttttgcttactctgtacctccaattcgatggaagcagtatccgttcactaactttttgatcaccatttcaagccatgttggactagccttcacatcctactatgcttctagagccgcgcttggtctaccatttgaactgcgcccctcatttagttttataattgcattcatgacagttatggggatgactattgcctttgcaaaggacatttcagatattgaaggagatgcaaaatatggtgtcagaacggtagctactaaattaggtgctagaaatatgaccagggttgtgtcgggggtgttgctattaaattacttagtcagtattttggcaggaataatctggccccaagcttttaattcaaatgtcatgatcttatcgcacgcaattttggccttctgtctcatctttagaacgagagaattagcccttgctaactacgcaagtgctccttcccgtcaatttttcgagtttatttggcggctgtattatgcggaatacctggtatacgttttcatt

SEQ ID NO: 416 - DNA, 2031 bp, Artificial Sequence
  Synthetic
atggcttcagaaaaagaaattaggagagagagattcttgaacgttttccctaaattagtagaggaattgaacgcatcgcttttggcttacggtatgcctaaggaagcatgtgactggtatgcccactcattgaactacaacactccaggcggtaagctaaatagaggtttgtccgttgtggacacgtatgctattctctccaacaagaccgttgaacaattggggcaagaagaatacgaaaaggttgccattctaggttggtgcattgagttgttgcaggcttactggttggtcgccgatgatatgatggacaagtccattaccagaagaggccaaccatgttggtacaaggttcctgaagttggggaaattgccatctgggacgcattcatgttagaggctgctatctacaagcttttgaaatctcacttcagaaacgaaaaatactacatagatatcaccgaattgttccatgaggtcaccttccaaaccgaattgggccaattgatggacttaatcactgcacctgaagacaaagtcgacttgagtaagttctccctaaagaagcactccttcatagttactttcaagactgcttactattctttctacttgcctgtcgcattggccatgtacgttgccggtatcacggatgaaaaggatttgaaacaagccagagatgtcttgattccattgggtgaatacttccaaattcaagatgactacttagactgcttcggtaccccagaacagatcggtaagatcggtacagatatccaagataacaaatgttcttgggtaatcaacaaggcattggaacttgcttccgcagaacaaagaaagactttagacgaaaattacggtaagaaggactcagtcgcagaagccaaatgcaaaaagattttcaatgacttgaaaattgaacagctataccacgaatatgaagagtctattgccaaggatttgaaggccaaaatttctcaggtcgatgagtctcgtggcttcaaagctgatgtcttaactgcgttcttgaacaaagtttacaagagaagcaaaggttctggatcagccgggagcgaccagatagaaggaagtcctcatcacgagtctgataactccattgcgacaaaaatcctgaatttcggtcatacgtgctggaagttacaaaggccctatgtcgtgaaaggtatgatttcgatagcttgtggcttgtttggtcgcgaactatttcataataccaaccttttatcttggtcattgatgctcaaggcattctcatccttaatggtaatcctttcttttaatttctttgctgccataatgaatcaaatttacgatgttgatattgaccgaattaacaaaccagatttgccactcgttagtggagagatgagtatcgaaactgcatggatactatcgatcattgtcgctctgacaggcttaatattgactattaagcttaattgtggtccgctatttatatcattgtattgcgtatctttattcgctggatttgcatacagcgttcctccaattcgttggaaacagtatcctttcaccaacttcttaataactatcagctcacacgtgggtgttaactttacatgttattacgcctccagagcagcctttggcttacccttcgaaatgtctccgccatttacttttattctcgcttttatgaccgtaatgggaatgacaatagctttcgcgaaagacatttcagatatcgaaggtgatgcgaaatatggggtgcggactgttgctacgaagttaggtgcaagaaatatgacgtttgttgtcagtggtgtcttgttgctgacatacgtaagcgctatacttgcagctatcatttggccgcaagcctttaagtcaaatgtgatgttgttatctcatgccatcctggcgttctgcctaattttcagaactagagagctagcgcttgcaaattatgcttctgcacctagtaggcagttttttgaatttatctggaaattgcattatgcagagtacttagtttatgttttcatc

SEQ ID NO: 417 - DNA, 2031 bp, Artificial Sequence
  Synthetic
atggcttcagaaaaagaaattaggagagagagattcttgaacgttttccctaaattagtagaggaattgaacgcatcgcttttggcttacggtatgcctaaggaagcatgtgactggtatgcccactcattgaactacaacactccaggcggtaagctaaatagaggtttgtccgttgtggacacgtatgctattctctccaacaagaccgttgaacaattggggcaagaagaatacgaaaaggttgccattctaggttggtgcattgagttgttgcaggcttactggttggtcgccgatgatatgatggacaagtccattaccagaagaggccaaccatgttggtacaaggttcctgaagttggggaaattgccatctgggacgcattcatgttagaggctgctatctacaagcttttgaaatctcacttcagaaacgaaaaatactacatagatatcaccgaattgttccatgaggtcaccttccaaaccgaattgggccaattgatggacttaatcactgcacctgaagacaaagtcgacttgagtaagttctccctaaagaagcactccttcatagttactttcaagactgcttactattctttctacttgcctgtcgcattggccatgtacgttgccggtatcacggatgaaaaggatttgaaacaagccagagatgtcttgattccattgggtgaatacttccaaattcaagatgactacttagactgcttcggtaccccagaacagatcggtaagatcggtacagatatccaagataacaaatgttcttgggtaatcaacaaggcattggaacttgcttccgcagaacaaagaaagactttagacgaaaattacggtaagaaggactcagtcgcagaagccaaatgcaaaaagattttcaatgacttgaaaattgaacagctataccacgaatatgaagagtctattgccaaggatttgaaggccaaaatttctcaggtcgatgagtctcgtggcttcaaagctgatgtcttaactgcgttcttgaacaaagtttacaagagaagcaaaggttctggatcagccgggagcgaccagatagaaggaagtcctcatcacgagtctgataactccattgcgacaaaaatcctgaatttcggtcatacgtgctggaagttacaaaggccctatgtcgtgaaaggtatgatttcgatagcttgtggcttgtttggtcgcgaactatttcataataccaaccttttatcttggtcattgatgctcaaggcattctcatccttaatggtaatcctttcttttaatttctttgctgccgcaatgaatcaaatttacgatgttgatattgaccgaattaacaaaccagatttgccactcgttagtggagagatgagtatcgaaactgcatggatactatcgatcattgtcgctctgacaggcttaatattgactattaagcttaattgtggtccgctatttatatcattgtattgcgtatctattttcgctggatttgcatacagcgttcctccaattcgttggaaaagatatcctttcaccaacttcttaataactatcagctcacacgtgggtgttaactttacatgttattacgcctccagagcagcctttggcttacccttcgaaatgtctccgccatttacttttattctcgcttttatgaccgtaatgggaatgacaatagctttcgcgaaagacatttcagatatcgaaggtgatgcgaaatatggggtgtctactgttgctacgaagttaggtgcaagaaatatgacgtttgttgtcagtggtgtcttgttgctgacatacgtaagcgctatacttgcagctatcatttggccgcaagcctttaagtcaaatgtgatgttgttatctcatgccatcctggcgttctgcctaattttcaggactagagagctagcgcttgcaaattatgcttctgcacctagtaggcagttttttgaatttatctggaaattgcattatgcagagtacttagtttatgttttcatc

SEQ ID NO: 418 - DNA, 2031 bp, Artificial Sequence
  Synthetic
atggcttcagaaaaagaaattaggagagagagattcttgaacgttttccctaaattagtagaggaattgaacgcatcgcttttggcttacggtatgcctaaggaagcatgtgactggtatgcccactcattgaactacaacactccaggcggtaagctaaatagaggtttgtccgttgtggacacgtatgctattctctccaacaagaccgttgaacaattggggcaagaagaatacgaaaaggttgccattctaggttggtgcattgagttgttgcaggcttactggttggtcgccgatgatatgatggacaagtccattaccagaagaggccaaccatgttggtacaaggttcctgaagttggggaaattgccatctgggacgcattcatgttagaggctgctatctacaagcttttgaaatctcacttcagaaacgaaaaatactacatagatatcaccgaattgttccatgaggtcaccttccaaaccgaattgggccaattgatggacttaatcactgcacctgaagacaaagtcgacttgagtaagttctccctaaagaagcactccttcatagttactttcaagactgcttactattctttctacttgcctgtcgcattggccatgtacgttgccggtatcacggatgaaaaggatttgaaacaagccagagatgtcttgattccattgggtgaatacttccaaattcaagatgactacttagactgcttcggtaccccagaacagatcggtaagatcggtacagatatccaagataacaaatgttcttgggtaatcaacaaggcattggaacttgcttccgcagaacaaagaaagactttagacgaaaattacggtaagaaggactcagtcgcagaagccaaatgcaaaaagattttcaatgacttgaaaattgaacagctataccacgaatatgaagagtctattgccaaggatttgaaggccaaaatttctcaggtcgatgagtctcgtggcttcaaagctgatgtcttaactgcgttcttgaacaaagtttacaagagaagcaaaggttctggatcagccgggagcgaccagatagaaggaagtcctcatcacgagtctgataactccattgcgacaaaaatcctgaatttcggtcatacgtgctggaagttacaaaggccctatgtcgtgaaaggtatgatttcgatagcttgtggcttgtttggtcgcgaactatttcataataccaaccttttatcttggtcattgatgctcaaggcattctcatccttaatggtaatcctttcttttaatttctttgctgccgcaatgaatcaaatttacgatgttgatattgaccgaattaacaaaccagatttgccactcgttagtggagagatgagtatcgaaactgcatggatactatcgatcattgtcgctctgacaggcttaatattgactattaagcttaattgtggtccgctatttatatcattgtattgcgtatctattttcgctggatttgcatacagcgttcctccaattcgttggaaacagtatcctttcaccaacttcttaataactatcagctcacacgtgggtgttaactttacatgttattacgcctccagagcagcctttggcttacccttcgaaatgtctccgccatttacttttattctcgcttttatgaccgtaatgggaatgacaatagctttcgcgaaagacatttcagatatcgaaggtgatgcgaaatatggggtgtctactgttgctacgaagttaggtgcaagaaatatgacgtttgttgtcagtggtgtcttgttgctgacatacgtaagcgctatacttgcagctatcatttggccgcaagcctttaagtcaaatgtgatgttgttatctcatgccatcctggcgttctgcctaattttcagaactagagagctagcgcttgcaaattatgcttctgcacctagtaggcagttttttgaatttatctggaaattgcattatgcagagtacttagtttatgttttcatc

SEQ ID NO: 419 - DNA, 2031 bp, Artificial Sequence
  Synthetic
atggcttcagaaaaagaaattaggagagagagattcttgaacgttttccctaaattagtagaggaattgaacgcatcgcttttggcttacggtatgcctaaggaagcatgtgactggtatgcccactcattgaactacaacactccaggcggtaagctaaatagaggtttgtccgttgtggacacgtatgctattctctccaacaagaccgttgaacaattggggcaagaagaatacgaaaaggttgccattctaggttggtgcattgagttgttgcaggcttactggttggtcgccgatgatatgatggacaagtccattaccagaagaggccaaccatgttggtacaaggttcctgaagttggggaaattgccatctgggacgcattcatgttagaggctgctatctacaagcttttgaaatctcacttcagaaacgaaaaatactacatagatatcaccgaattgttccatgaggtcaccttccaaaccgaattgggccaattgatggacttaatcactgcacctgaagacaaagtcgacttgagtaagttctccctaaagaagcactccttcatagttactttcaagactgcttactattctttctacttgcctgtcgcattggccatgtacgttgccggtatcacggatgaaaaggatttgaaacaagccagagatgtcttgattccattgggtgaatacttccaaattcaagatgactacttagactgcttcggtaccccagaacagatcggtaagatcggtacagatatccaagataacaaatgttcttgggtaatcaacaaggcattggaacttgcttccgcagaacaaagaaagactttagacgaaaattacggtaagaaggactcagtcgcagaagccaaatgcaaaaagattttcaatgacttgaaaattgaacagctataccacgaatatgaagagtctattgccaaggatttgaaggccaaaatttctcaggtcgatgagtctcgtggcttcaaagctgatgtcttaactgcgttcttgaacaaagtttacaagagaagcaaaggttctggatccgcaggatcagatcaaatagaagggagcccccatcacgagtcggacaacagtatcgcgacaaaaattcttaattttggccatactttctggaagttacagcgtccttacgtagttaaaggtatgatttctatcgcttgcggtttgttcggtaaggaactactccacaatacgaacttgatatcatggtctttaatgtttaaagccttctttgctctggtcccaattctaagtttcaattttttcgcagccgctgttaatcaaatctatgatgttgaaatagataggattaacaagccggatttaccactcgtgtccggagaaatgtctatagagacagcttggatcctgtcgattattgtcgctcttactggcttgatagttaccattaaaatgaaaggtggccctttatttgtgtttatctatatatttggtttgttcgcaggttttgcttactctgtacctccaattcgatggaagcagtatccgttcactaactttttgatcaccatttcaagccatgttggactagccttcacatcctactatgcttctagagccgcgcttggtctaccatttgaactgcgcccctcatttagttttataattgcattcatgacagttatggggatgactattgcctttgcaaaggacatttcagatattgaaggagatgcaaaatatggtgtccggacggtagctactaaattaggtgctagaaatatgaccagagttgtgtcgggggtgttgctattaaattacttagtcagtattttggcaggaataatctggccccaagcttttaattcaaatgtcatgatcttatcgcacgcaattttggccttctgtctcatctttcgtacgagagaattagcccttgctaactacgcaagtgctccttcccgtcaatttttcgagtttatttggaggctgtattatgcggaatacctggtatacgttttcatt

SEQ ID NO: 420 - DNA, 2031 bp, Artificial Sequence
  Synthetic
atggcttcagaaaaagaaattaggagagagagattcttgaacgttttccctaaattagtagaggaattgaacgcatcgcttttggcttacggtatgcctaaggaagcatgtgactggtatgcccactcattgaactacaacactccaggcggtaagctaaatagaggtttgtccgttgtggacacgtatgctattctctccaacaagaccgttgaacaattggggcaagaagaatacgaaaaggttgccattctaggttggtgcattgagttgttgcaggcttactggttggtcgccgatgatatgatggacaagtccattaccagaagaggccaaccatgttggtacaaggttcctgaagttggggaaattgccatctgggacgcattcatgttagaggctgctatctacaagcttttgaaatctcacttcagaaacgaaaaatactacatagatatcaccgaattgttccatgaggtcaccttccaaaccgaattgggccaattgatggacttaatcactgcacctgaagacaaagtcgacttgagtaagttctccctaaagaagcactccttcatagttactttcaagactgcttactattctttctacttgcctgtcgcattggccatgtacgttgccggtatcacggatgaaaaggatttgaaacaagccagagatgtcttgattccattgggtgaatacttccaaattcaagatgactacttagactgcttcggtaccccagaacagatcggtaagatcggtacagatatccaagataacaaatgttcttgggtaatcaacaaggcattggaacttgcttccgcagaacaaagaaagactttagacgaaaattacggtaagaaggactcagtcgcagaagccaaatgcaaaaagattttcaatgacttgaaaattgaacagctataccacgaatatgaagagtctattgccaaggatttgaaggccaaaatttctcaggtcgatgagtctcgtggcttcaaagctgatgtcttaactgcgttcttgaacaaagtttacaagagaagcaaaggttctggatcagccgggagcgaccagatagaaggaagtcctcatcacgagtctgataactccattgcgacaaaaatcctgaatttcggtcatacgtgctggaagttacaaaggccctatgtcgtgaaaggtatgatttcgatagcttgtggcttgtttggtcgcgaactatttcataataccaaccttttatcttggtcattgatgctcaaggcattctcatccttaatggtaatcctttcttttaatttctttgctgccagtatgaatcaaatttacgatgttgatattgaccgaattaacaaaccagatttgccactcgttagtggagagatgagtatcgaaactgcatggatactatcgatcattgtcgctctgacaggcttaatattgactattaagcttaattgtggtccgctatttatatcattgtattgcgtatctttgttcgctggatttgcatacagcgttcctccaattcgttggaaacagtatcctttcaccaacttcttaataactatcagctcacacgtgggtgttaactttacatgttattacgcctccagagcagcctttggcttacccttcgaaatgtctccgccatttacttttattctcgcttttatgaccgtaatgggaatgacaatagctttcgcgaaagacatttcagatatcgaaggtgatgcgaaatatggggtgagaactgttgctacgaagttaggtgcaagaaatatgacgtttgttgtcagtggtgtcttgttgctgacatacgtaagcgctatacttgcagctatcatttggccgcaagcctttaagtcaaatgtgatgttgttatctcatgccatcctggcgttctgcctaattttccaaactagagagctagcgcttgcaaattatgcttctgcacctagtaggcagttttttgaatttatctggaaattgcattatgcagagtacttagtttatgttttcatc

SEQ ID NO: 421 - DNA, 2031 bp, Artificial Sequence
  Synthetic
atggcttcagaaaaagaaattaggagagagagattcttgaacgttttccctaaattagtagaggaattgaacgcatcgcttttggcttacggtatgcctaaggaagcatgtgactggtatgcccactcattgaactacaacactccaggcggtaagctaaatagaggtttgtccgttgtggacacgtatgctattctctccaacaagaccgttgaacaattggggcaagaagaatacgaaaaggttgccattctaggttggtgcattgagttgttgcaggcttactggttggtcgccgatgatatgatggacaagtccattaccagaagaggccaaccatgttggtacaaggttcctgaagttggggaaattgccatctgggacgcattcatgttagaggctgctatctacaagcttttgaaatctcacttcagaaacgaaaaatactacatagatatcaccgaattgttccatgaggtcaccttccaaaccgaattgggccaattgatggacttaatcactgcacctgaagacaaagtcgacttgagtaagttctccctaaagaagcactccttcatagttactttcaagactgcttactattctttctacttgcctgtcgcattggccatgtacgttgccggtatcacggatgaaaaggatttgaaacaagccagagatgtcttgattccattgggtgaatacttccaaattcaagatgactacttagactgcttcggtaccccagaacagatcggtaagatcggtacagatatccaagataacaaatgttcttgggtaatcaacaaggcattggaacttgcttccgcagaacaaagaaagactttagacgaaaattacggtaagaaggactcagtcgcagaagccaaatgcaaaaagattttcaatgacttgaaaattgaacagctataccacgaatatgaagagtctattgccaaggatttgaaggccaaaatttctcaggtcgatgagtctcgtggcttcaaagctgatgtcttaactgcgttcttgaacaaagtttacaagagaagcaaaggttctggatcagccgggagcgaccagatagaaggaagtcctcatcacgagtctgataactccattgcgacaaaaatcctgaatttcggtcatacgtgctggaagttacaaaggccctatgtcgtgaaaggtttgatttcgatagcttgtggcttgtttggtcgcgaactatttcataataccaaccttttatcttggtcattgatgctcaaggcattctcatccttaatggtaatcctttcttttaatttctttgctgccgcaatgaatcaaatttacgatgttgatattgaccgaattaacaaaccagatttgccactcgttagtggagagatgagtatcgaaactgcatggatactatcgatcattgtcgctctgacaggcttaatattgactattaagcttaattgtggtccgctatttatatcattgtattgcgtatctattttcgctggatttgcatacagcgttcctccaattcgttggaaacagtatcctttcaccaacttcttaataactatcagctcacacgtgggtgttaactttacatgttattacgcctccagagcagcctttggcttacccttcgaaatgtctccgccatttacttttattctcgcttttatgaccgtaatgggaatgacaatagctttcgcgaaagacatttcagatatcgaaggtgatgcgaaatatggggtgagaactgttgctacgaagttaggtgcaagaaatatgacgtttgttgtcagtggtgtcttgttgctgacatacgtaagcgctatacttgcagctatcatttggccgcaagcctttaagtcaaatgtgatgttgttatctcatgccatcctggcgttctgcctaattttccaaactagagagctagcgcttgcaaattatgcttctgcacctagtaggcagttttttgaatttatctggaaattgcattatgcagagtacttagtttatgttttcatc

SEQ ID NO: 422 - DNA, 2031 bp, Artificial Sequence
  Synthetic
atggcttcagaaaaagaaattaggagagagagattcttgaacgttttccctaaattagtagaggaattgaacgcatcgcttttggcttacggtatgcctaaggaagcatgtgactggtatgcccactcattgaactacaacactccaggcggtaagctaaatagaggtttgtccgttgtggacacgtatgctattctctccaacaagaccgttgaacaattggggcaagaagaatacgaaaaggttgccattctaggttggtgcattgagttgttgcaggcttactggttggtcgccgatgatatgatggacaagtccattaccagaagaggccaaccatgttggtacaaggttcctgaagttggggaaattgccatctgggacgcattcatgttagaggctgctatctacaagcttttgaaatctcacttcagaaacgaaaaatactacatagatatcaccgaattgttccatgaggtcaccttccaaaccgaattgggccaattgatggacttaatcactgcacctgaagacaaagtcgacttgagtaagttctccctaaagaagcactccttcatagttactttcaagactgcttactattctttctacttgcctgtcgcattggccatgtacgttgccggtatcacggatgaaaaggatttgaaacaagccagagatgtcttgattccattgggtgaatacttccaaattcaagatgactacttagactgcttcggtaccccagaacagatcggtaagatcggtacagatatccaagataacaaatgttcttgggtaatcaacaaggcattggaacttgcttccgcagaacaaagaaagactttagacgaaaattacggtaagaaggactcagtcgcagaagccaaatgcaaaaagattttcaatgacttgaaaattgaacagctataccacgaatatgaagagtctattgccaaggatttgaaggccaaaatttctcaggtcgatgagtctcgtggcttcaaagctgatgtcttaactgcgttcttgaacaaagtttacaagagaagcaaaggttctggatccgcaggatcagatcaaatagaagggagcccccatcacgagtcggacaacagtatcgcgacaaaaattcttaattttggccatactttctggaagttacagcgtccttacgtagttaaaggtctaatttctatcgcttgcggtttgttcggtaaggaactactccacaatacgaacttgatatcatggtctttaatgtttaaagccttctttgctctggtcccaattctaagtttcaattttttcgcagccgcagtgaatcaaatctatgatgttgaaatagataggattaacaagccggatttaccactcgtgtccggagaaatgtctatagagacagcttggatcctgtcgattattgtcgctcttactggcttgatagttaccattaaaatgaaaggtggccctttatttgtgtttatctatatatttggtctgttcgcaggttttgcttactctgtacctccaattcgatggaagcagtatccgttcactaactttttgatcaccatttcaagccatgttggactagccttcacatcctactatgcttctagagccgcgcttggtctaccatttgaactgcgcccctcatttagttttataattgcattcatgacagttatggggatgactattgcctttgcaaaggacatttcagatattgaaggagatgcaaaatatggtgtcagaacggtagctactaaattaggtgctagaaatatgacccgggttgtgtcgggggtgttgctattaaattacttagtcagtattttggcaggaataatctggccccaagcttttaattcaaatgtcatgatcttatcgcacgcaattttggccttctgtctcatctttcgtacgagagaattagcccttgctaactacgcaagtgctccttcccgtcaatttttcgagtttatttggttgctgtattatgcggaatacctggtatacgttttcatt

SEQ ID NO: 423 - DNA, 2031 bp, Artificial Sequence
  Synthetic
atggcttcagaaaaagaaattaggagagagagattcttgaacgttttccctaaattagtagaggaattgaacgcatcgcttttggcttacggtatgcctaaggaagcatgtgactggtatgcccactcattgaactacaacactccaggcggtaagctaaatagaggtttgtccgttgtggacacgtatgctattctctccaacaagaccgttgaacaattggggcaagaagaatacgaaaaggttgccattctaggttggtgcattgagttgttgcaggcttactggttggtcgccgatgatatgatggacaagtccattaccagaagaggccaaccatgttggtacaaggttcctgaagttggggaaattgccatctgggacgcattcatgttagaggctgctatctacaagcttttgaaatctcacttcagaaacgaaaaatactacatagatatcaccgaattgttccatgaggtcaccttccaaaccgaattgggccaattgatggacttaatcactgcacctgaagacaaagtcgacttgagtaagttctccctaaagaagcactccttcatagttactttcaagactgcttactattctttctacttgcctgtcgcattggccatgtacgttgccggtatcacggatgaaaaggatttgaaacaagccagagatgtcttgattccattgggtgaatacttccaaattcaagatgactacttagactgcttcggtaccccagaacagatcggtaagatcggtacagatatccaagataacaaatgttcttgggtaatcaacaaggcattggaacttgcttccgcagaacaaagaaagactttagacgaaaattacggtaagaaggactcagtcgcagaagccaaatgcaaaaagattttcaatgacttgaaaattgaacagctataccacgaatatgaagagtctattgccaaggatttgaaggccaaaatttctcaggtcgatgagtctcgtggcttcaaagctgatgtcttaactgcgttcttgaacaaagtttacaagagaagcaaaggttctggatcagccgggagcgaccagatagaaggaagtcctcatcacgagtctgataactccattgcgacaaaaatcctgaatttcggtcatacgtgctggaagttacaaaggccctatgtcgtgaaaggtatgatttcgatagcttgtggcttgtttggtcgcgaactatttcataataccaaccttttatcttggtcattgatgctcaaggcattctcatccttaatggtaatcctttcttttaatttctttgctgcctctatgaatcaaatttacgatgttgatattgaccgaattaacaaaccagatttgccactcgttagtggagagatgagtatcgaaactgcatggatactatcgatcattgtcgctctgacaggcttaatattgactattaagcttaattgtggtccgctatttatatcattgtattgcgtatctttattcgctggatttgcatacagcgttcctccaattcgttggaaacagtatcctttcaccaacttcttaataactatcagctcacacgtgggtgttaactttacatgttattacgcctccagagcagcctttggcttacccttcgaaatgtctccgccatttacttttattctcgcttttatgaccgtaatgggaatgacaatagctttcgcgaaagacatttcagatatcgaaggtgatgcgaaatatggggtgtctactgttgctacgaagttaggtgcaagaaatatgacgtttgttgtcagtggtgtcttgttgctgacatacgtaagcgctatacttgcagctatcatttggccgcaagcctttaagtcaaatgtgatgttgttatctcatgccatcctggcgttctgcctaattttcagaactagagagctagcgcttgcaaattatgcttctgcacctagtaggcagttttttgaatttatctggaaattgcattatgcagagtacttagtttatgttttcatc

SEQ ID NO: 424 - protein, 352 aa, Saccharomyces cerevisiae
MASEKEIRRERFLNVFPKLVEELNASLLAYGMPKEACDWYAHSLNYNTPGGKLNRGLSVVDTYAILSNKTVEQLGQEEYEKVAILGWCIELLQAYFLVADDMMDKSITRRGQPCWYKVPEVGEIAINDAFMLEAAIYKLLKSHFRNEKYYIDITELFHEVTFQTELGQLMDLITAPEDKVDLSKFSLKKHSFIVTFKTAYYSFYLPVALAMYVAGITDEKDLKQARDVLIPLGEYFQIQDDYLDCFGTPEQIGKIGTDIQDNKCSWVINKALELASAEQRKTLDENYGKKDSVAEAKCKKIFNDLKIEQLYHEYEESIAKDLKAKISQVDESRGFKADVLTAFLNKVYKRSK

SEQ ID NO: 425 - protein, 352 aa, Artificial Sequence; identical to SEQ ID NO: 103
  Synthetic

SEQ ID NO: 426 - protein, 346 aa, Artificial Sequence
  Synthetic
MPATDRAAFQEIFPSLAEDILAYAKESNLPQNALQWFEKALNVNVPGGKLNRGLSCPDTGLALLEKPLTEEQFKHLSILGWLTELLQAFFLVSDDIMDGSITRRGQPCWYRHEGVGLIAIWDAFLLESSIYIILKKHFRSHPAYADFIDLFHETTWQTELGQLCDLITAPEDKVDLNNFSMEKYMFIVTYKTAYYSFYLPVALALLYLQRATPSNLRQAHDILIPLGQYFQVQDDYLDAYGNPDVIGKIGTDIKDNKCSWLVNQALQRCNAEQRKVLDEAYGRKDDALEAKVKALYKELDLEKVYQEYEEKIVGELKEKIAAVDESEGLKKDVFNAFLGKIYKRSK

SEQ ID NO: 427 - protein, 402 aa, Artificial Sequence
  Synthetic
MSDKAARRARFEGAWNEIRDEILAYFQGEHMPPEAVEWYKNNLDYNVPGGKLNRGMSVCDTVQILKGRELTDEEYKRAAVLGWCVELLQGFWLVSDDIMDASITRRGQPCWYRVPKVGMLAINDSFMLEAPIYWLIKKYFRRESFYADLVDLFHETTYQTEMGQLVDLITAPEDVVDLSKFSLERHRLIVVYKTAYYSFYLPVACAMMICGIPFPEKEPRFDFLNGGFGGAPLDPTADPYTTALSILIPLGEYFQVQDDYLDYSAPPEVLGKIGTDIIDNKCSWVVNAALVLTAPAHSPSASASTPFAPTASGSLATSNLSEERKAELRKILDDNYGKKSKENEEKVKEVYRELDIAAHYKRYEEGVVGEVRRRIASVDEAKTGLKRDVFTSFLEKIYGRSK

SEQ ID NO: 428 - protein, 347 aa, Artificial Sequence
  Synthetic
MGKTTLKEFEAVFPLLVDEIMAVLEGYKISSEAAAWYRKVLEHNTVGGKCNRGMSVVDTYSTLTNQDKLSDEDYLRSAILGWCTELLQAFWLVSDDIMDGSKTRRGSPCWYLHEGVGNIAINDAFMLESAIYILLKKHFRNTPYYIDLIELFHDVSFQTELGQLLDLITAPEDRVDLSKFSLEKHSFIVIFKTAYYSFYLPVALAMYMAGVATPENLKQAHDVLIPLGEYFQIQDDYLDCYGDPEHIGKIGTDIKDNKCGWLINQALAIATPEQRQVLDDNYGKKDDVAEARVKKVFLDLELEKRYQDYEETVVGKIRTLIEGIDETTGFKKDVLTNFLNKIYKRSK

SEQ ID NO: 429 - protein, 352 aa, Artificial Sequence
  Synthetic
MVAVKLQKEENRQAFLKVFPTLADEVLAELRKYNMPEDAYEWTKKMLYYNVPGGKLNRGISVVDTVRILKGDSVTEDDIFKATVLGWLIEFLQAFFLVSDDIMDASITRRGQPCWYKSEGVGMVAIWDAFILESCIYIFLKKYFKKTNYYIELVELFHEVTFQTELGQLCDLITAPEDHVDLSKFSIKKHQFIVIYKTAYYSFYLPVALAMHMVGVKNEEAFKQAHDILIPLGEYFQVQDDYLDCYGAPEVIGKIGTDIMDNKCSWLINQALAKASPEQRKTLDENYGKKNADSEAKVKQIYIDLDIEGTYKAYEEKSFNDLNALIDQLDESAGLKKMVFTEFMDKIYKRTK

SEQ ID NO: 430 - protein, 345 aa, Artificial Sequence
  Synthetic
MSSPRAAFEAVFPSLAQDILDHAKKYNLPQNALEWLEKNLNTNVPGGKLNRGLSVPDTGVALLKKPLSEEQYKDLATLGWMTELLQAFFLVSDDLMDGSITRRGQPCWYRQPGVGLIAIWDAFLLESGIYIILKKQFRSHPAYIDIVELFHETTWQTELGQLCDLITAPEDKVDLDNFSMEKYMFIVTYKTAYYSFYLPVALALLYLQLATPENLQQAHDILIPLGQYFQVQDDYLDAYGDPEVIGKIGTDIQDNKCSWIVNQALQRCNAEQRKLLDTCYGRKDAALEAKVKELFKELDLETVYKEYEEKIVGEIKTKIAAVDESQGLKKEVFEAFLGKIYKRTK

SEQ ID NO: 431 - protein, 347 aa, Artificial Sequence
  Synthetic
MAKSAALEKFESIFPTLVEDVLAHSKSYGLPQQALDWFKANLNANAIGGKCNRGMSVPDSVSLMTGKELNEEEYFKAATLGWLTELLQAYWLVSDDIMDSSITRRGVPCWYRQPEVGMIAINDAFMLESAIYILLKKYFRSHKSYVDLMELFHEVTFQTELGQTCDLLTAPEDKVDLDNFSMEKYTFIVIYKTAYYSFYLPVALALHQLGIATEKNLKQAEAILIPLGTYFQIQDDYLDNFGDPAHIGKIGTDILDNKCSWLVNKALLIATPEQRKVLEENYGRKNKDNEAVVKKLYNELALEKLYQEYEESEVTKIKKLIEETDESEGLKKSVFESFLGKIYKRTK

SEQ ID NO: 432 - protein, 352 aa, Artificial Sequence
  Synthetic
MAALTNGQDRRARFTAVFPKLQKELIEFVIAQGFPQEALSWFQRNLEYNAPGGKLNRGMSVVDTLEILRGEPLSEEEYFKSALLGWCVELLQAFFLVSDDIMDTSITRRGQPCWYRVEGVGMIAIWDAFMLEGAIYHLLKSHFRKDSYYVDLLDLFHETTFQTELGQLIDLITAPEDHIDLDRFSLRKHQLIVIYKTAYYSFYLPVALAMYMAGIQDQAAFKQAQDILIPLGEYFQVQDDYLDCYGAPEFIGKIGTDILDNKCSWNVNVALAACTPEQRRVLDETYGRKDSICEAKVKEIFLAVDIPGKYAAYEQQSYEKINGLIDGIAETPGGLKRDVFRAFLSKIYKRTK

SEQ ID NO: 433 - protein, 347 aa, Artificial Sequence
  Synthetic
MATKATRADFEKVFPSLVEDLLGEARKYNLPDNALQWFERSLNANTPGGKLNRGMSVPDTGSQLLERPLSPEEFKDLATLGWLTELLQAFWLVSDDIMDASITRRGEPCWYRREGVGMIAINDSFMLESGIYLILKKHFRSHPAYLDLIELFHEVTWQTELGQLCDLITAPEDHVDLNNFSMEKYTFIVIYKTAYYSFYLPVALALHYLRLATPQNLKQAHDILIPLGEYFQIQDDYLDAFGDPSVIGKIGTDIKDNKCGWLINQALQICTPEQRKVLDENYGQKDDAKEAKVKELYNELQLEKRYRDYEEKRVGEIRQMIANVDESAGLKKGVFEEYLAKIYKRSK

SEQ ID NO: 434 - protein, 347 aa, Artificial Sequence
  Synthetic
MATRISRSEFEAFVAPLIEEIIQSTEQYKLPENARQWFEASLKANIVGGKMNRGMSVPDTASILLGRPLTADELKHLALLGWFTELLQAFFLVSDDIMDSSITRRGQPCWYRQEGVGLIAIWDAFMLESAIYVILKKYFRSHPAYVDLLELFHETTYQTELGQLCDLITAPEDKVDLDNFSMEKYTFIVKYKTAYYSFYLPVTLALHYLQLATPNNLKQCEDILIPLGEYFQIQDDYLDAFGLPETIGKIGTDIQDNKCSWLVNQALTMVTPEQRQLLNEAYGRKDSALEAKVKALYNDLKLEQHYLNFEEERVGNLRRQISAVDESEGLKKEIFSAFLDKIYKRSK

SEQ ID NO: 435 - protein, 345 aa, Artificial Sequence
  Synthetic
MPVTLKEFESVFPQLVEDVLAHCKQYNLPDNALQWFKNSLNHNTVGGKCNRGMSVVDTSSLLLGRDLTKDEFFHSATLGWMIELLQAFFLVSDDIMDSSKTRRGSPCWYLMPDVGMIAIWDAFMLEASIYVLLKKYFRQNKHYIDLVELFHEVTFQTELGQACDLLTAPEDKVDLDNFSLEKYTFIVIYKTAYYSFYLPVALALYFCDQATPKNLQIAKDILIPMGEYFQIQDDYLDNFADPTVLGKIGTDIQDNKCSWLVNQALKIATPEQRQVLEKNYGRKDAACEAEVKKLYEELNLKKIYEDYEEKRVSEIRDMIANIDESEGLKKSVFEEFLRKIYKRSK

SEQ ID NO: 436 - protein, 347 aa, Artificial Sequence
  Synthetic
MAAKTNRADFESVFPSLVKDVSDHAMQYGLPSAALEWFQNSMNANTPGGKLNRGLSVPDTGLALLEKPLNDEQFKHLCTLGWMTEFLQAFFLVSDDMMDSSITRRGEPCWYRRPNVGMIAIWDAFMLESTIYVLLKKHFRSHPAYVDFLELFHEVSFQTELGQLCDLLTAPEDNVDLNNFNMDKFNFIVIYKTAYYSFYLPVALALHYLQLATPSNLRQAHDILIPLGQYFQAQDDYLDVFGKPEQIGKIGTDIQDNKCSWVINQALKRCSAEQRKVLDESYGRKDAAMEAKVKVVFNELNLEKVYRDFEEEQVGKIRTMIAGLDESEGLKKGVFESFLAKIYKRDK

SEQ ID NO: 437 - protein, 347 aa, Artificial Sequence
  Synthetic
MAKSASLEKFESIFPTLVEDVLAHSKSYGLPQQALDWFKNNLNANAIGGKCNRGMSVPDSVSLMTGKELNEEEYFKAATLGWLTELLQAYFLVSDDIMDSSITRRGVPCWYRQPEVGMIAIWDAFMLESAIYILLKKYFRSHKSYVDLMELFHEVTFQTELGQTCDLLTAPEDKVDLDNFSMEKYTFIVIYKTAYYSFYLPVALALHQLGIATEKNLKQAEAILIPLGTYFQIQDDYLDNFGDPEHIGKIGTDILDNKCSWLVNKALLIATPEQRKVLEENYGRKNKDNEAVVKKLYDELALEKLYQEYEESEVGKIRKLIDGTDESEGLKKSVFESFLGKIYKRTK

SEQ ID NO: 438 - protein, 351 aa, Artificial Sequence
  Synthetic
MSKESNRAKFVAEFPELVKELKSVLTGYGMPAEAVKWYEDSLNYNTPGGKLNRGLSVVDTYAILKGYASVDDLPVEVYKKVALLGWCIELLQAYFLVADDMMDQSITRRGQPCWYRVKEVGDIAIWDAFMLEGAIYVLLKKHFRQEPYYVDLIELFHDVTFQTELGQLLDLITAPEDKVDLSKFSLEKHSFIVTFKTAYYSFYLPVALAMYVAGISDPKDLQQAHDVLIPLGEYFQIQDDYLDCFGTAEQIGKIGTDIQDNKCSWVVNKALQLASPEQRKLLDENYGKKDAECEARCKKLFHDLDIQKHYQAYEEKVAQDLRAKIAQTDESRGFRAQVLTAFLNKVYKRSK

SEQ ID NO: 439 - protein, 347 aa, Artificial Sequence
  Synthetic
MAQQTTLQEFNSVYPKLEEALLDHARSYKLPQEQLDWYKRSLEVNPLGGKCNRGMSVPDSVSLLLEKPLTEEQYFQAATLGWMTELLQAFFLVSDDIMDSSITRRGQPCWYRQEGVGMIAIWDAFMLESAIYTLLKKYFRSHPAYVDLIELFHETTFQTELGQLCDLLTAPEDNVNLDNFSLEKYSFIVIYKTAYYSFYLPVALALHQLNLATPSNLKQAEDILIPLGEYFQIQDDYLDNFGKPEHIGKIGTDIKDNKCSWLVNQALAVATPEQRKILEENYGRKDDEKEKVVKKLYDDLNLEQRYLDYEEKVVGQIRERIANIDENEGLKKTVFEAFLAKIYKRSK

SEQ ID NO: 440 - protein, 351 aa, Artificial Sequence
  Synthetic
MSKEDKRNKFLSVFPQLVDELKSILAGYGMTQDALQWYENSLNYNTPGGKLNRGLSVVDTYAILKGKSSYEELSEEEYFKLAMLGWCIELLQAYWLVADDMMDKSITRRGQPCWYRVPEVGEVAINDAFMLEGAIYCLLKNHFKKEAYYVDLLELFHDVTFQTELGQMLDLITAPEDRVDLDKFSLERHSFIVRFKTAYYSFYLPVALAMYVAGVSDEQDLKQAQDVLIPLGEYFQIQDDFLDCFGKPEDIGKIGTDIQDNKCSWVVNTALKLCSAEQRKVLDANYGRKNSESEAKCKQVFDDLKIDSIYHDYEEKTAQNLRNMIQNTDETRGFKSQVLTVFLEKVYKRKK

SEQ ID NO: 441 - protein, 350 aa, Artificial Sequence
  Synthetic
MDKAAARQKFVAEFDNLVKELQEISAGYNMPKEAIEWFTKNLEYNTPGGKLNRGLSVIDTYCILKNKTVESLAADEYKKVALLGWAIELLQAYFLVADDMMDQSKTRRGQPCWYLAEGVGNIAIWDSFMLEGAIYILLKKHFRQDLYYVDLLDLFHEVTFQTELGQLLDLVTADEEHVDLSKFSLEKHSFIVIFKTAYYSFYLPVALAMYMCGINSDEDLKQVKDVLIPLGEYFQIQDDYLDCFGTPEQIGKIGTDIKDNKCSWVVNQALLKANESQRQVLDDNYGKKDDESEQRVKDLFAELQIPSIYEQYEEEVVAKLRAQIEKIDESRGLKKEVLSSFLAKVYKRSK

SEQ ID NO: 442 - protein, 378 aa, Artificial Sequence
  Synthetic
MPAPTNPTEIALQASTTNGMSSAEKKKQARAKFEGVYQVLRKDLLDHFAGEGMPKDAIEWYSRNLDYNVPGGKLNRGMSVVDSVEIIKGRALTDEEYLKSAILGWCIELLQAFFLVSDDLMDSSVTRRGQPCWYRVENVGLISIWDAFMLEGAIYHLLKKYFRQDSYYVELLDLFHDVTYKTEMGQLIDLITAPEDHVDLDKFSLKKHQLIVIYKTAFYSFYLPVALAMHVCGIPPSPNSPSDPYKLAHEILIPLGEYFQVQDDFLDFGGTPEQIGKIGTDILDNKCSWCINTALAVATLEQRRVLDENYGRKDAAKEAKVKEVFEQVEIRRRYEEYEQTAYERINGLIETIPADAKDGELKREVFTSFLSKIYKRTK

SEQ ID NO: 443 - protein, 351 aa, Artificial Sequence
  Synthetic
MDKSTARSKFLDVFPELVSDLETVTKEYGMPQDAIEWFKRNLNYNTPGGKLNRGLSVVDTYALLKGYKSFDDFEPEEYKKTAILGWAVELLQAYFLVADDMMDKSITRRGQPCWYRVDGVNEIAIWDSFMLEAAIYVLLKKYFRKDSYYVDLLELFHEVTFQTELGQLLDLLTAPEDHVDLSKFSLSKHSFIVTFKTAYYSFYLPVALAMYMAGVSDEKDLKQAQDVLIPLGEYFQIQDDYLDCFGKPEDIGKIGTDILDNKCSWVINTALKICTPEQRAILDENYGRKDSAKEAKCKQIFKDLKIDQLYLEYEEKVATELRSKIANVDESRGFKGEVLTSFLNKIYKRQK

SEQ ID NO: 444 - protein, 347 aa, Artificial Sequence
  Synthetic
MATRISRSEFEGFVHPLIKDILEATEQYNLPENARKWFSDSLNANIVGGKMNRGMSVPDTGSILLGRPLTDEEKKHLSLLGWFTELLQAFFLVSDDIMDGSITRRGQPCWYRREGVGMIAIWDAFMLESAIYVILKKYFRSHPAYTDLLELFHETTWQTELGQLCDLITAPEDHVDLNNFSMEKYTFIVKYKTAYYSFYLPVTLALHYLQVATPKNLKQCEDILIPLGEYFQIQDDYLDAFGSPETIGKIGTDIQDNKCSWLVNRALTIVTPEQRKLLDEAYGRKDSALEAKVKALYNDIKLEQHYLKFEEQRVGQLRQQIEAVDESEGLKKEVFSAFLEKIYKRSK

SEQ ID NO: 445 - protein, 379 aa, Artificial Sequence
  Synthetic
MGADRQAFEGFFPQVVRDLTADGLRHPEVGDAVARLKEVLEYNSPGGKHTRGLTVLAAFRRLVQPEQQGPDSVRCALAVGWCIELLQAFFLVADDIMDSSLTRRGQPCWYKKEGIGLDAVWDSFLLESSIYRLLKKYCRGQPYYLHLLELFLQTSYQTELGQALDLITAPPTQVDLARFTEQRYKAIVKYKTAFYSFYLPVAAAMYMAGIESEEEHANAKAILLEMGEFFQIQDDFLDCFGDPSLTGKIGTDIQDNKCSWLVVECLRRASPEQRKLLEENYGQKELEKVARVKELYEALGLRAVYQEYEDSSFQHLQQLIEVHTPHLPKEIFLDLAHVIYKRQNEHRSASCCPDAWARTGRQQVQTAATWQRVVDDLSG

SEQ ID NO: 446 - protein, 347 aa, Artificial Sequence
  Synthetic
MASTTKRADFEAVFPGLAKDILEHAKRYNLPANALEWFEKSLFANTPGGKLNRGLSVPDTGLALLKKPLTEEQFEHLSILGWLTELLQAFWLVSDDIMDSSITRRGQPCWYRQEGVGLIAINDAFMLESAIYLILKQRFRSHPAYIDLVELFHETTWQTELGQLCDLITAPEDHVNLDNFSMEKYMFIVTYKTAYYSFYLPVALALLYLQVATPETLKQAHDILIPLGQYFQIQDDYLDNFGDPSVIGKIGTDIQDNKCSWLVNQAIARATPEQRAVLDSAYGRKDKEQELKVKKIFDDLELEKVYKEYEEKVVGELRAKIAAVDETTGLKKEVFESFLAKIYKRTK

SEQ ID NO: 447 - protein, 353 aa, Artificial Sequence
  Synthetic
MSAALTNGQDRRARFTAVFPKLEKELLDFVTAQGFPQEAISWFQRNLDYNAPGGKLNRGMSVVDSLEILRGGPLSEEEYFKSALLGWCVELLQAFFLVSDDIMDSSITRRGQPCWYRVEGIGMIAIWDSFMLEGSIYHLLKSHFRKDSYYVDLLDLFHETTFQTELGQLIDLITAPEDHIDLNRFSLRKHQLIVIYKTAYYSFYLPVALAMHMAGIKDEAAFKHAQDILIPLGEYFQVQDDYLDCYGAPEFIGKIGTDILDNKCSWNVNVALANCSPEQRKVLDENYGRKDAACEAKVKEVFLAVDIPGKYAVYEQESYEKINGLINAIDETPGGLKRDVFRAFLAKIYKRTK

SEQ ID NO: 448 - protein, 354 aa, Artificial Sequence
  Synthetic
MVAATNSLSKEDKRAKFEAVFPILVDEIVDYLTSVNVPQDAKDWFKKSLYHNTLGGKYNRGLSVIDTYEILSGKALDDNSYFRAALLGWCIELLQAFWLVADDMMDESKTRRGQPCWYLMPNVGSIAINDSFMLESAIYFLLKKHFRHETYYVDLLDLFHEVTFQTTLGQELDLLTAPENHVDLSKFSQDKHAFIVIFKTAYYSFYLPVALAMCMANVATPDNLQRASDVLIPLGKYFQIQDDYLDCYGDPSVTGKVGTDILDNKCSWLINVALAKASPEQRKVLDENYGRKDADCEKRVKAVFEELNLKKAYEEYEESEVSTIKQRISVLDESAGLKKEAFTTFLNKIYKRSK

SEQ ID NO: 449 - protein, 349 aa, Artificial Sequence
  Synthetic
MADKAAVKQKFIDSFDPLVEDLLAVLKQYNISPEATEWFKKSLYYNGVGGKLNRGLSVIDTYQILTGKNELTDEEYKKAAVLGWGIELLQGFFLVSDDIMDASKTRRGQPCWYLVPKVGMIAIWDAFMLETAIYFLLKKYFRSEPYYIDLVELFHDVTFQTELGQLLDLITAPEDEVDLSKFSLAKHSFIVIYKTAYYSFYLPVALAMYMAGVSKPEDLKQAHDVLIPLGEYFQIQDDYLDCYGDPAFIGKIGTDILDNKCSWLINTALKKANPEQRKILDENYGQKNGACEAKVKAVYNELDLENEYFKYEEDAVGRIKTLIDNVDESRGFKKDVLSAFLAKIYKRQK

SEQ ID NO: 450 - protein, 346 aa, Artificial Sequence
  Synthetic
MTSKSELELFLSLYEPLKAQIVSDLENFEANQEMVERIKLVMDYSILGGKMNRGISVLSTVKLIKGESITKDLQEKAIILGWCIEWLQAFFLVADDIMDDSPMRRGKPAWYRNDNVGMIAIWDSFLIESFIFRILKIHFRQQSYYIDLIELFHEVIYQTELGQMLDLITSPTSVNLDLFNLDKHHFIVKYKTSFYSFYLPVALALLACGETPDSKSFDISRDILVPMGVYFQVQDDYLDLYGDVKLTGKVGTDIKDNKCSWLVIKALSKCNPEQRKILDLHYGKKSDEDEAIVKKLYQELDVQGMFLEYANETEAHLNNMISNVDKSEINPQIFYSFLNKISHRQK

SEQ ID NO: 451 - protein, 352 aa, Artificial Sequence
  Synthetic
MASEKEIRRERFLNVFPKLVEELNASLLAYGMPKEACDWYAHSLNYNTPGGKLNRGLSVVDTYAILSNKTVEQLGQEEYEKVAILGWCIELLQAYFLVADDMMDKSITRRGQPCWYKVPEVGEIAIWDAFMLEAAIYKLLKSHFRNEKYYIDITELFHEVTFQTELGQLMDLITAPEDKVDLSKFSLKKHSFIVTFKTAYYSFYLPVALAMYVAGITDEKDLKQARDVLIPLGEYFQIQDDYLDCFGTPEQIGKIGTDIQDNKCSWVINKALELASAEQRKTLDENYGKKDSVAEAKCKKIFNDLKIEQLYHEYEESIAKDLKAKISQVDESRGFKADVLTAFLNKVYKRSK

SEQ ID NO: 452 - protein, 347 aa, Artificial Sequence
  Synthetic
MAKSAALEKFESIFPTLVEDVLAHSKSYNLPQQALDWFKNSLNANAIGGKCNRGMSVPDSVALMTGKELSEDEYFHAATLGWMTELLQAFWLVSDDIMDSSITRRGAPCWYRQPEVGMIAINDAFMLEAAIYILLKKYFRQHKSYVDLLELFHEVTFQTELGQTCDLLTAPEDKVDLDNFSMEKYTFIVIYKTAYYSFYLPVALALHQLGIATEKNLKQAEDILIPLGTYFQIQDDYLDNFGNPEHIGKIGTDILDNKCSWLVNKALLIATPEQRKVLEENYGRKNKDNEAVVKKLYDELALEKLYQEYEEAEVGKIRKLIEEVDESEGLKKSVFESFLGKIYKRTK

SEQ ID NO: 453 - protein, 347 aa, Artificial Sequence
  Synthetic
MGKTTLKEFEAVFPLLVDEIMAVLEGYKISSEAAAWYRKVLEHNTVGGKCNRGMSVVDTYSTLTNQDKLSDEDYLRSAILGWCTELLQAFFLVSDDIMDGSKTRRGSPCWYLHEGVGNIAIWDAFMLESAIYILLKKHFRNTPYYIDLIELFHDVSFQTELGQLLDLITAPEDRVDLSKFSLEKHSFIVIFKTAYYSFYLPVALAMYMAGVATPENLKQAHDVLIPLGEYFQIQDDYLDCYGDPEHIGKIGTDIKDNKCGWLINQALAIATPEQRQVLDDNYGKKDDVAEARVKKVFLDLELEKRYQDYEETVVGKIRTLIEGIDETTGFKKDVLTNFLNKIYKRSK

SEQ ID NO: 454 - protein, 351 aa, Artificial Sequence
  Synthetic
MSAEDKRNKFLGVFPALVDELKSILSGYGMTEDALKWYEDSLNYNTPGGKLNRGLSVVDTYAILKGKKSYADLSDEEYFKLAILGWCIELLQAYWLVADDMMDKSITRRGQPCWYRVPEVGEIAINDAFMLEGAIYCLLKKHFRSESYYVDLLELFHDVTFQTELGQLLDLITAPEDRVDLDKFSLERHSFIVRFKTAYYSFYLPVALAMYAAGINSEHDLQQAQAVLIPLGEYFQIQDDFLDCFGKPEDIGKIGTDIQDNKCSWVINTALKLCSADQRKVLDENYGRKDAESEARCKHVFHDLKIDSLYLEYEEKTAHDLRNLIQNTDESRGFKAQVLTAFLEKVYKRKK

SEQ ID NO: 455 - protein, 347 aa, Artificial Sequence
  Synthetic
MPTTIKEFESVWPRIVADLQDHCKQYKLPQQSLDWFTKSLDYNTVGGKCNRGMSVIDTTSILQGKTLDPSSEEYFRAALLGWMIELLQAFFLVSDDIMDSSKTRRGSPCWYLAPKVGMIAIWDAFMLESSIYVLLKKHFRQETSYVDIVELFHEVTFQTECGQLCDLLTAPEDDVNLDNFSLDKFTFIVIYKTAYYSFYLPVALALYYAGAATPKNLKTAEDILVPMGEYFQAQDDYLDAFADPSVLGKIGTDIMDNKCSWLVNQALKKVNPEQRKLLDENYGQKDSQKEAKVKELYHELKLKEFYEQWEEDRVADLRAKIAQVDESEGLKKDIFELFLQKIYKRSK

SEQ ID NO: 456 - protein, 347 aa, Artificial Sequence
  Synthetic
MASTTKRADFEAVFPGLAKDILEHAKRYNLPANALEWFEKSLFVNTPGGKLNRGLSVPDTGLALLQKPLTDEQFEHLSILGWLTELLQAFWLVSDDIMDSSITRRGQPCWYRHEGVGLIAINDAFMLESAIYLILKQRFKSHPSYIDLVELFHETTWQTELGQLCDLITAPEDNVNLDNFSMEKYMFIVTYKTAYYSFYLPVALALLYLQVATPETLKQAHDILIPLGQYFQIQDDYLDNFGDPSVIGKIGTDIQDNKCSWLVNQAIARATPEQRAVLDSAYGRKDKVQEAKVKKIFDELELEKVYKEYEEKVVGELRAKIAAVDETTGLKKEVFESFLAKIYKRTK

SEQ ID NO: 457 - protein, 346 aa, Artificial Sequence
  Synthetic
MTTTQRADFEAVFPSLAQDLLDHAKKYNLPDNALEWFNNALHVNVPGGKLNRGLSVPDTGLALLQKPLTDEQFKHLSTLGWLTELLQAFFLVSDDIMDSSITRRGQPCWYRHQGVGLIAIWDAFMLESGIYVILKKHFRSHPAYIDLVELFHETAWQTELGQLCDLITAPEDHVDLDNFSMEKYMFIVTYKTAYYSFYLPVALALHYLQLATPENLKQTHDILIPLGQYFQVQDDYLDAYGDPAVIGKIGTDIKDNKCSWIINQALQLASAEQRKTLDAAYGRKDDELEAKVKVIYRELNLEKVYQDYEEKVVGEIRTKIGALDESQGLKKGVFEAFLSKIYKRSK

SEQ ID NO: 458 - protein, 358 aa, Artificial Sequence
  Synthetic
MSSKAEKRARFDHVFEVIRDELVEYFKAQGMPQDATEWYIKNLNYNVPGGKLNRGLSVVDSVEILKGRALTEDEYFKAAVLGWCVELLQAFFLVSDDVMDSSITRRGQPCWYRNEGVGLVAIWDAFILEAAIYWLLKKHFRADPSYINLVELFHETSFQTEMGQLLDLITAPEDKVDLSKFSLERHRLIVVYKTAFYSFYLPVALAMYLCGISHQAAQDPYALASSILIPLGEYFQVQDDYLDFAGTPEQIGKIGTDIVDNKCSWCVNTALALAAPAQRAVLDASYGRKDAAAEARVKKVFEEVGLHAKYAAYEEDAYRRIVGLIATIPEAGLGADGEVKLQRAVFKSFLDKIYKRQK

SEQ ID NO: 459 - protein, 349 aa, Artificial Sequence
  Synthetic
MSDNRTKFLNVFPSLVKELRDILAGYGMPEEAIQWYEKSLNYNSVGGKLNRGLSVVDTYALLKGYKSVDELSDEEYKKVAILGWCIELLQAYFLVADDMMDKSITRRGQPCWYKVPNVGEIAIWDAFMLEGAIYCLLKNHFRQEPYYVDILELFHDVTFQTELGQLLDLITAPEDKVDLSKFSLEKHSFIVIFKTAYYSFYLPVALALYAAGITDPRDLKQARDVLIPLGEYFQIQDDYLDCFGKPEDIGKIGTDIQDNKCSWVINIALKKASPEQRKVLDENYGRKDAEKEQKCRAVFNELDIESIYHEYEEKVASELRAKIANIDESRGFKAEVLTLFLNKIYHRKK

SEQ ID NO: 460 - protein, 358 aa, Artificial Sequence
  Synthetic
MPVTIPLKTSPEVIAAFEKSYHVIAEDLLHDLEHKYKMPAVGVQRMRQMLEHNVMGGKMNRGLAVVDTLMIIAQAQGKTLTEDDIFRAHVAGWAIEWLQACFLVADDIMDQSHTRRGKPCWYRMPGVGLEAVWDALVLEGHIFMFIKKHFRSQPYYADLVDLLHEVAYLTELGQMIDMLTAPEGDVNLSRFSLDRHAYIVVHKTSYYSFYLSVAMAFMLSGITNPAAFDQAKQILLPLGEYFQVQDDYLDAFADPSVLGKIGTDIEDNKCSWLVNTALARCTPEQRTLLDTNYGRKDAKCIEAVKQLYRDMQLDQEFERYEEASYKRIMGMINGIDKGLGVPPEVYVSFMNKIYKRSK

SEQ ID NO: 461 - protein, 347 aa, Artificial Sequence
  Synthetic
MAKSASLEKFESIFPTLVEDVLAHSKSYGLPQQALDWFKNNLNANAIGGKCNRGMSVPDSVSLMTGKELNEEEYFKAATLGWLTELLQAYFLVSDDIMDSSITRRGVPCWYRQPEVGMIAIWDAFMLESAIYILLKKYFRSHKSYVDLMELFHEVTFQTELGQTCDLLTAPEDKVDLDNFSMEKYTFIVIYKTAYYSFYLPVALALHQLGIATEKNLKQAEAVLIPLGTYFQIQDDYLDNFGDPEHIGKIGTDILDNKCSWLVNKALSIATPEQRKVLEENYGRKNKDNEAVVKKLYNELGLEKLYQEYEEKEVGNIRKLIDETDESEGLKKTVFESFLGKIYKRTK

SEQ ID NO: 462 - protein, 347 aa, Artificial Sequence
  Synthetic
MAKADALQKYESIFPTLVEDVLAHSKSYGLPQQALDWFKNNLNANAIGGKCNRGMSVPDSVSLMTGKELNEEEYFKAATLGWLTELLQAYWLVSDDIMDSSITRRGVPCWYRQPEVGMIAINDAFMLESAIYILLKKYFRSHKSYVDLMELFHEVTFQTELGQTCDLLTAPETKVDLDNFSMEKYTFIVIYKTAYYSFYLPVALALHQLGIATEKNLKQAEAILIPLGTYFQIQDDYLDNFGDPEHIGKIGTDILDNKCSWLVNKALLIATPEQRKILDENYGRKNKDNEAVVKKLYNELGLEKLYQEYEESEVGKIRKLIDETDESEGLKKSVFESFLGKIYKRTK

SEQ ID NO: 463 - protein, 347 aa, Artificial Sequence
  Synthetic
MATTTPRADFEKVFPSLVEDLLGEARKYKLPDNALQWFERSLNANTPGGKLNRGMSVPDTGSQLLERPLSPDEFKDLATLGWLTELLQAFFLVSDDIMDASITRRGEPCWYRQEGVGMIAIWDAFMLESGIYLTLKKHFRSHPAYLDLIELFHEVTWQTELGQLCDLITAPEDHVDLNSFSMDKYTFIVIYKTAYYSFYLPVALALHYLRLATPQNLKQAHDILIPLGEYFQIQDDYLDAFGDPSVIGKIGTDIKDNKCGWLINQALQICTPEQRKVLDENYGQKDDAKEAKVKELYDELQLEKRYRAYEEKRVGEIRQLIAAVDESTGLKKGVFEVFLAKIYKRSK

SEQ ID NO: 464 - protein, 354 aa, Artificial Sequence
  Synthetic
MSKEVAAKNKVKFLAFFPDLVFELEVMLENYGMPADAINWFKRSLNYNTPGGKLNRGISVVDTYVILKGYKSWDELSAEEFKKAAILGWCVELLQAYFLVADDMMDQSITRRGQPCWYKVENVGNIAIWDSFMLEGAIYKILRKYFKKESYYADLLDLLHEVTFQTELGQLLDLITAPEDHVDLSKFTPAKHSFIVIFKTAYYSFYLPVVMAMYLSGITHEKDLQQAEHILIPLGEYFQIQDDYLDCFGKPEDIGKIGTDIQDNKCSWVINQALRLASPEQRQILDENYGRKDADKEAKCKEVFDQLDIAGKYKAYEENIGKELQKRIADTEEDRGFKKEVFQVFFDKIYKRTK

SEQ ID NO: 465 - protein, 351 aa, Artificial Sequence
  Synthetic
MSKEEKREKFLSVFPKLVEELKSILVGYGMRGDAVQWFENSLNYNTPGGKLNRGLSVVDTYAILTGKGSFKDLSDDEYFKLATLGWCIELLQAYFLVADDMMDKSITRRGQPCWYRIENVGEIAIWDAFMLEAAIYCLLKNHFKKESYYVDLIELFHDVTFQTELGQLLDLITAPEDNVDLSKFSLEKHSFIVRFKTAYYSFYLPVALAMYVAGITDAKDLKQAQDVLIPLGEYFQIQDDYLDCFGKPEDIGKIGTDIQDNKCSWVVNTALKICTPEQRTLLDENYGKKDAESEKKCKQLFYDLKINDMYHEYEEGIAKELKEKIANVDESRGFKGDVLTAFLEKVYKRKK

SEQ ID NO: 466 - protein, 350 aa, Artificial Sequence
  Synthetic
MTTTSKQQEIDEFIKICYELKEEVLTTMKTKYTMPQEAIDWVNEMIDYNCIGGKLNRGISVIHCAEALTQGKGLTPEARKKAAILGWCIEWLQAFFLVADDVMDDSITRRGQPCWYRIPKVKQIAIWDAFLLESFVYQILKTHFRGESYYLDLVETFQEVIFQTELGQLLDLTSQPLDGPTNLDRFTIERHQKIVVFKTAYYTFYLSAASAMFLSGVSDPACYTLAQEICVKIGEYFQVQDDYLDCYADPEVLGKIGTDIQDNKCSWLVVQALARATPEQRAVIKEHYGKNNEASIAVIKALYVSLDLEGVYRKYENESYDELCKLIGAVNNMPATVFHMLLSKIYKRTM

SEQ ID NO: 467 - protein, 347 aa, Artificial Sequence
  Synthetic
MAQKTTLKEFEAVYPKLEEALLDHAKSYKLPEKELEWLKKNLEVNPLGGKCNRGMSVPDSASVILGRPLTEDEYFKTATLGWMTELLQAFFLVSDDIMDSSITRRGQPCWYRQEGVGMIAIWDAFILESGIYIILKKFFRDHPRYIELVELFHETSFQTELGQLCDLLTAPEDSVNLDNFSLEKYSFIVIYKTAFYSFYLPVALALYYLDIATPKNLQTAKDILIPLGEYFQIQDDYLDNFGLPEHIGKIGTDIKDNKCSWLVNQALKIVSPEQRKILEDNYGQKDDAKEKVIKQLYDDLKLKELYEEFEEKRAGELKDMINKIDESEGLKKQVFEVFLGKIYKRSK

SEQ ID NO: 468 - protein, 350 aa, Artificial Sequence
  Synthetic
MDKQAAKDKFIGEFDALVDELKQILHHYKMPQEAVDWFTKNLYYNAPGGKLNRGLSVIDTYCILKNVKIEELSDAEYKKVAILGWAIELLQAYFLVADDMMDQSKTRRGQPCWYLKPGVGNIAIWDSFMLEGAIYVLLKKHFRQDPYYVDLLDLFHEVTFQTELGQLLDLVTADEEHVDLDKFSLQKHSFIVIFKTAYYSFYLPVALAMFMSGVSSQKDLEQVKNVLIPLGEYFQIQDDYLDCFGTPEQIGKIGTDIKDNKCSWVVNQALLKVNAEQRKLLDENYGKKDDESEARVKKLFHDLDIPKIYNEYEEDVVSRLRAQIENIDESRGLKKEVLTSFLNKVYKRSK

SEQ ID NO: 469 - protein, 347 aa, Artificial Sequence
  Synthetic
MGKTTLKEFEAVFPLLVDELMGVLEQYKIPAEAAAWYRRNLEQNTLGGKCNRGMSVVDTYSILTGQDKLSDTEYLRTAILGWCTELLQAFFLVADDIMDSSKTRRGSPCWYLFDGVGNIAIWDSFMLESAVFILIKKHFRKESYYIDLVELFQETIFQTELGQLLDLITAPEDRVDLSKFSLAKHSFIVIFKTAYYSFYLPVALAMYMAGIATESNLKQARDVLIPLGEYFQIQDDYLDCYGDPEHIGKIGTDIKDNKCGWLINKALAIATPEQRDILDKNYGRKDDEAEARIKQVYIELELEKCYQEYEEQAVGKIRGLIDQVDESNGLKKEVLTSFLNKIYKRSK

SEQ ID NO: 470 - protein, 351 aa, Artificial Sequence
  Synthetic
MSKEGNREKFLEEFPELVHELKTILQNYGMPQDAIQWYESSLFFNTPGGKLNRGLSVVDTYVILKGYKSFSDMAKEEYKKVAILGWCIELLQAYFLVADDMMDKSITRRGQPCWYRVKGVGEIAIWDAFMLEAAIYILLKNHFRSESYYVDLIELFHDVTFQTELGQLLDLITAPEDKVDLNKFSMNKQSFIVRFKTAYYSFYLPVALAMYMAGINSDTDLQQAQDVLIPLGEYFQIQDDFLDCFGTPEQIGKIGTDIQDNKCSWVINKALELVTPEQRKVLDENYGQKNQECEDKCREVFNSLNLPKYYEQYEENIAKELREKISQIDESRGFKGEVLTVFLNKIYKRTK

SEQ ID NO: 471 - protein, 351 aa, Artificial Sequence
  Synthetic
MSKAESKSKFLAVFPKIVNELQSILKSYNMSQEAIDWFTNNLNYNTPGGKLNRGLSVVDTYVILKNYTSINDLSTEEYEKVAILGWCIELLQAYFLVADDMMDSSITRRGQPCWYRVENVNQIAIWDSFMLEASIYVLLKNHFRNDPYYVDLIELFHDITFKTELGQLLDLITAPEDNVNLSNFSLDKHSFIVIYKTAYYSFYLPVALAMYMANVSNEIDLKQAHDILIPLGEYFQIQDDFLDCFGKPEDIGKIGTDIQDNKCSWIINTALTLADKEQKQLLDNNYGQKDAAKEKICKDIFQNLKIDQIYHDYEEKIVNELKQKISKVDQSRGFKSEVLSVFLNKIYKRKK

SEQ ID NO: 472 - protein, 351 aa, Artificial Sequence
  Synthetic
MTKEDNRKKFLDQFPSLVAQLTEALKTYGIPQDAIDWYEKSLMYNTPGGKLNRGLSVVDTYVILKGLNSPFDMPDEEYSKVALLGWCVELLQAYFLVADDMMDKSITRRGQPCWYRIDEVGDMAIWDAFMLEAAIYCLLKRNFRNESYYVDLLELLHDVTFQTEVGQLLDLMTAPEMLIDLSKFSLERHSYIVIFKTAYYSFYLPVALAMHISGVNDERDLQQAKDVLLPLGEYFQIQDDYLDCFGKPEDIGKIGTDIQDNKCSWVINAALKLCSPEQRKILDDNYGRKSDICEQKCKQVFADLNLEKVYENYEEQVAAKLRDRIEMTDESRGFKREVLYSFLDKIYKRKK

SEQ ID NO: 473 - protein, 350 aa, Artificial Sequence
  Synthetic
MDKQAAKDRFIKEFDQLVKELQEILTNYKMPQEAIDWFTKSLDYNTPGGKLNRGLSVIDTYAILKGTTSDKLGDEEYKKAALLGWCIELLQAYFLVADDMMDASKTRRGQPCWYLVEGVGNIAIWDSFMLEGAIYILLKKHFRQDKYYVDLLDLFHEVTFQTELGQLLDLVTADEEHVDLDKFSLEKHSFIVTFKTAYYSFYLPVALSMFMVGVSSEEDLKQARDILIPLGEYFQIQDDFLDCFGTPEQIGKIGTDIKDNKCSWVVNKALNKVNQAQRKLLDENYGKKDDESEQRVKDLFKELEIEKDYYQYEESIVSELKQKIDQVDESRGFKKEVLTSFLGKVYKRSK

SEQ ID NO: 474 - protein, 354 aa, Artificial Sequence
  Synthetic
MVAATNSLSKEDKRAKFEAVFPILVDEIVDYLTSVNVPQDAKDWFKKSLYHNTLGGKYNRGLSVIDTYEILSGKALDDNSYFRAALLGWCIELLQAFFLVADDMMDESKTRRGQPCWYLMPNVGSIAIWDSFMLESAIYFLLKKHFRHETYYVDLLDLFHEVTFQTTLGQELDLLTAPENHVDLSKFSQDKHAFIVIFKTAYYSFYLPVALAMCMANVATPDNLQRASDVLIPLGKYFQIQDDYLDCYGDPSVTGKVGTDILDNKCSWLINVALAKASPEQRKVLDENYGRKDADCEKRVKAVFEELNLKKAYEEYEESEVSTIKQRISVLDESAGLKKEAFTTFLNKIYKRSK

SEQ ID NO: 475 - protein, 350 aa, Artificial Sequence
  Synthetic
MDKAAIRKKFTDEFDGLVDELKEMLVLYNMPAEAIEWFQKNLDYNTPGGKLNRGLSVIDTYCILKGKKLEDLSAAEYKKVAILGWCIELLQAYFLVADDMMDQSKTRRGQPCWYLVEGVGNIAIWDSFMLEGAIYMLLKKHFRQDSYYVDLLDLFHEVTFQTELGQLLDLVTADEEHVDLDKFSLAKHSFIVIFKTAYYSFYLPVALAMFMCGINSDADLKQVRDVLIPLGEYFQIQDDFLDCFGTPEQIGKIGTDIKDNKCSWVVNQALLKATPEQRKVLDENYGKKDDESEQRVKDLFNEMKIADIYNEYEEAIGAKLKEQIDKVDESRGLKKEVLTAFLAKVYKRSK

SEQ ID NO: 476 - protein, 350 aa, Artificial Sequence
  Synthetic
MDKAAAKERFINEFDQLVEELKAILIGYKMPQDAIDWFVGNLNYNTPGGKLNRGLSVIDTYCILNNTTANDLSSEEYSKVALLGWCIELLQAYFLVADDMMDHSKTRRGQPCWYLNEGVGNIAIWDSFMLEGALYILLKKHFRNEKYYVDLLDLFHEVTFQTELGQLIDLITADEEIVDLDKFSLSKHSFIVIYKTAYYSFYLPVALAMFMSGINSEQDLKQVRDILIPLGEYFQIQDDFLDCFGTPEQIGKIGTDIKDNKCSWVVNQALLHANEEQRKLLDENYGKKDDESEKRCKQLFKDLNIEKIYFDYEEDTGAKLRKQIEQIDESRGLKKEVLTSFLNKVYKRSK

SEQ ID NO: 477 - DNA, 1059 bp, Artificial Sequence
  Synthetic
atggccagtgagaaagaaataagacgtgaaagattcttaaatgtttttccaaagcttgtcgaagaactaaacgcatctctgttggcttatggtatgcctaaggaagcttgcgactggtacgctcattccttgaactacaatacaccaggcggtaaattgaacagaggattatcagtagtcgatacctatgccatcttgtctaacaagacggttgaacagttgggtcaagaagagtacgaaaaggtggctattttgggttggtgtattgagcttttacaagcttacttcttggttgctgatgacatgatggataaatcaatcactagaaggggtcaaccatgttggtacaaggttcctgaagtaggtgaaattgccatcaacgacgcctttatgttggaagctgcaatttataagctactaaagtcgcacttcagaaatgaaaaatactatatcgatattaccgagttgttccacgaagtcacttttcaaactgaacttggtcaattaatggacttgataaccgctccagaagacaaggttgatctatctaagttttccttgaagaagcattctttcattgtcactttcaagacagcttactattccttttacttacccgttgccctggctatgtatgtcgccggcatcaccgatgaaaaagacttgaaacaagctcgtgatgttttgattccattgggtgagtacttccagatccaagacgattacttagactgtttcggtactccagaacaaatcggtaagatcggtacagacattcaagataacaagtgcagctgggttattaataaagctcttgaattggcttccgccgaacagaggaagactttggacgaaaactatggtaagaaggattctgtagctgaagctaaatgtaagaaaatcttcaatgatctaaaaattgagcaattgtaccacgaatacgaagaatctatcgccaaggatcttaaggcaaaaatttctcaagtcgacgagagtagaggctttaaggctgatgtgttaaccgcattcttgaacaaggtgtacaaaagatccaagtaa

SEQ ID NO: 478 - DNA, 1059 bp, Artificial Sequence
  Synthetic
atggccagtgagaaagaaataagacgtgaaagattcttaaatgtttttccaaagcttgtcgaagaactaaacgcatctctgttggcttatggtatgcctaaggaagcttgcgactggtacgctcattccttgaactacaatacaccaggcggtaaattgaacagaggattatcagtagtcgatacctatgccatcttgtctaacaagacggttgaacagttgggtcaagaagagtacgaaaaggtggctattttgggttggtgtattgagcttttacaagcttactggttggttgctgatgacatgatggataaatcaatcactagaaggggtcaaccatgttggtacaaggttcctgaagtaggtgaaattgccatctgggacgcctttatgttggaagctgcaatttataagctactaaagtcgcacttcagaaatgaaaaatactatatcgatattaccgagttgttccacgaagtcacttttcaaactgaacttggtcaattaatggacttgataaccgctccagaagacaaggttgatctatctaagttttccttgaagaagcattctttcattgtcactttcaagacagcttactattccttttacttacccgttgccctggctatgtatgtcgccggcatcaccgatgaaaaagacttgaaacaagctcgtgatgttttgattccattgggtgagtacttccagatccaagacgattacttagactgtttcggtactccagaacaaatcggtaagatcggtacagacattcaagataacaagtgcagctgggttattaataaagctcttgaattggcttccgccgaacagaggaagactttggacgaaaactatggtaagaaggattctgtagctgaagctaaatgtaagaaaatcttcaatgatctaaaaattgagcaattgtaccacgaatacgaagaatctatcgccaaggatcttaaggcaaaaatttctcaagtcgacgagagtagaggctttaaggctgatgtgttaaccgcattcttgaacaaggtgtacaaaagatccaagtaa

SEQ ID NO: 479 - DNA, 1041 bp, Artificial Sequence
  Synthetic
atgcctgcaacagaccgtgctgcctttcaggaaatcttcccatccttagctgaggatattctagcttatgccaaggaatctaacctgccccaaaatgctttgcaatggttcgaaaaagctttgaacgtaaatgttccaggcggtaagcttaacagaggtttatcatgtccagatacgggtttggcattgcttgaaaaacctttgaccgaagaacaatttaagcatttaagcatattgggttggttgaccgagttgttgcaagctttcttcttagtctctgacgatattatggacggtagtatcactaggagaggacaaccatgctggtacagacacgaaggtgttggtttgattgccatctgggatgcttttctgctggaatcctctatttacattatactaaagaagcacttcagatctcatccagcatatgctgactttatcgatttgttccacgaaactacctggcaaactgaattaggccagctatgtgacttgattactgctcctgaggataaagtggacctaaacaatttcagcatggaaaagtacatgttcatagttacatacaagaccgcctactattccttttatttgccagtagctttggctcttttgtacttacaaagagctactccatcgaacttgagacaagcacatgacatccttatcccattgggtcaatactttcaagttcaagatgactatttagatgcttacggtaacccagatgtcattggtaaaatcggtaccgatattaaggacaacaagtgtagttggttggtcaatcaggcactacaaagatgtaatgccgaacaacgtaaagttctggacgaagcttacggtagaaaggacgatgctttggaagccaaagtgaaggctttgtacaaagaattagatttggaaaaggtttatcaggagtacgaagaaaagattgtcggagaattaaaggaaaagatcgccgctgttgatgaatccgagggtttgaagaaggatgtcttcaacgccttcttaggtaagatttacaaaaggtcaaagtaa

SEQ ID NO: 480 - DNA, 1209 bp, Artificial Sequence
  Synthetic
atgtcagataaggctgcacgtagagccaggtttgaaggtgcttggaacgagatcagagatgaaattctagcttacttccagggagaacatatgcctcccgaagccgttgaatggtataaaaataacttggactacaatgtaccaggtggtaagcttaacagaggtatgtccgtctgtgacactgttcaaatactgaaaggcagagaattgacggacgaggaatataagagagctgctgtgttaggttggtgcgtcgaattgttacaaggtttctggttggttagcgatgatatcatggacgccagtattaccagaaggggtcaaccatgttggtaccgtgttccaaaggtcggtatgctagctattaatgattcttttatgttggaagctccaatctactggttgattaaaaagtatttcagaagagaatctttttacgccgacttggttgacttattccacgaaacaacctaccaaactgagatgggtcaacttgttgatctgatcactgcacctgaagatgtcgtcgacttgtcgaagttctctttggagagacacagattgattgtggtatacaaaaccgcttattactctttttatttaccagttgcttgtgcaatgatgatctgtggtatcccattcccagaaaaggaaccacgtttcgactttcttaacggcggttttggtggtgcccccttggatcctactgctgatccttacactaccgccctatccattttaataccattgggagaatacttccaagttcaggacgactacttggactattcggctccaccagaagttttgggtaagataggtacagatattattgataacaaatgctcctgggtcgttaacgctgctttagttttaacagctccagctcattctcccagtgcctcagcttctactccattcgcaccaaccgcctccggttctttggctacatccaatctatccgaggaaagaaaggccgaattgagaaaaatcttagatgataattacggtaagaagtcaaaggaaaacgaggaaaaagtcaaggaagtttaccgtgaattggacattgccgctcactataagagatacgaagaaggtgtcgttggcgaagtaagacgtagaatcgcatctgttgatgaagccaagaccggattaaaaagagatgtgtttactagcttcttggaaaagatttatggtagaagtaagtaa

SEQ ID NO: 481 - DNA, 1044 bp, Artificial Sequence
  Synthetic
atgggtaaaactacacttaaggagttcgaagctgtgtttcctctactggttgatgaaataatggccgtcttagaaggatataagatctcttcagaagcagctgcttggtaccgtaaggtattggaacataacaccgttggtggtaaatgtaataggggcatgtcggttgtcgacacgtacagcactttgaccaaccaagataagttgtctgacgaagattacttgagatccgccattttaggttggtgcactgagttgttacaggctttctggttggtcagtgacgacattatggatggttctaagaccagaagaggttctccctgttggtatctacacgaaggtgtgggtaatatcgctattaacgacgctttcatgttggaatccgccatctacatcttgctgaaaaagcactttagaaacactccatactatatagatctaattgagttgttccatgatgttagctttcaaacagaattaggccaattgcttgacttgatcactgctccagaagacagagttgatctttccaaattctctttagaaaagcacagttttattgtcatcttcaagaccgcctattactcattctacctaccagtagcattggctatgtacatggctggtgttgcaactccagaaaatttgaagcaagctcacgatgtcttgattcctctgggtgagtacttccaaatccaggacgactatttggattgttacggtgatcccgaacatataggtaagattggaacggatattaaagacaacaagtgcggttggctgatcaaccaagccttagctattgctaccccagaacaaagacaagttttagacgataattatggtaaaaaggatgacgttgccgaagctagggtcaagaaagtatttttggacttagaattggagaaacgttaccaagattacgaagaaacagttgtaggtaagataagaaccttaatcgaaggtattgatgagactactggttttaagaaggatgttctgactaacttcctgaataagatttacaagagatctaagtaa

SEQ ID NO: 482 - DNA, 1059 bp, Artificial Sequence
  Synthetic
atggtcgccgttaaactacagaaggaggaaaacagacaagcatttttaaaggtattcccaaccctggctgacgaagttcttgctgaattgaggaagtataatatgcctgaagatgcttacgaatggactaaaaagatgttgtactacaacgtcccaggaggtaagttgaatagaggtatatccgtggttgatacagttcgtattttgaagggtgactcagtcactgaggacgatatcttcaaagccaccgttttaggttggttgattgaatttcttcaagctttcttcttggtttctgatgacatcatggatgcttctattacgagaagaggccaaccctgttggtataagagtgaaggtgtcggtatggttgccatctgggacgcttttatattagaatcgtgcatttacatcttcttgaagaaatacttcaaaaagactaactattacattgagttagtggaactatttcacgaagtcacctttcaaactgaattgggtcaactgtgtgatttgataactgcaccagaagatcatgtagacttgtctaagttctccatcaagaaacaccagttcattgttatctataagaccgcctactactctttctatttgccagtcgctttggctatgcatatggttggcgtcaagaacgaagaagcttttaagcaagcccacgacatcttgattcctttaggtgaatacttccaagtacaagatgactacttagattgttatggtgctccagaagtaattggtaaaattggaactgacataatggacaacaagtgtagctggctgatcaatcaagctctagctaaggcttccccagaacaaagaaagacattggatgaaaattatggtaaaaagaacgccgactcagaggcaaaagttaagcaaatttacatcgatttggatattgagggtacctacaaagcttacgaagaaaagtcttttaacgatcttaatgccctaattgatcaattggacgaatccgctggccttaaaaagatggttttcactgaatttatggataagatctacaaaagaacaaaataa

SEQ ID NO: 483 - DNA, 1038 bp, Artificial Sequence
  Synthetic
atgtcctcaccaagagcagcttttgaggctgttttccccagtttggcccaagatatcctagaccatgctaaaaagtacaacttacctcagaatgcccttgaatggttagaaaagaacctgaatacaaacgtgccaggaggcaaattgaacaggggtttgtctgtcccagataccggtgtagctttgttgaagaagccactttcggaagaacaatataaagacttggctactttgggttggatgacggagttattgcaagctttctttttggtcagcgatgacttaatggacggttctataacccgtagaggtcaaccttgttggtacagacaaccaggtgttggtcttattgccatttgggatgccttcttattggaatctggaatctacattatcctaaagaagcagttcagatcccacccagcatatatcgatattgttgaactatttcacgaaactacttggcaaacagaattgggtcaattgtgcgacttaattaccgctccagaggacaaagttgatttggataatttctccatggaaaagtacatgtttatcgttacttataagaccgcttactatagcttctacctgcctgtcgccttggcacttttgtacctgcaattggctactccagaaaacctacaacaggctcatgacatcttaattccattgggtcaatacttccaagtgcaagatgactacttagatgcctacggtgacccagaagtcatcggtaagataggaactgacatccaagataacaagtgttcttggattgttaatcaagctttacagagatgtaatgctgaacaaagaaaactgttggacacttgttatggtagaaaagatgctgcattggaggctaaggttaaagaattgtttaaggaactagatttggaaaccgtctacaaggaatatgaggaaaagattgttggtgaaatcaagacgaaaattgctgccgtggatgaatcgcaaggtttaaagaaggaggttttcgaagccttcttgggcaagatttacaagcgtacaaaataa

SEQ ID NO: 484 - DNA, 1044 bp, Artificial Sequence
  Synthetic
atggctaagagcgccgctctggaaaaatttgagtccatattccctaccctagtcgaagacgttcttgcacactcaaagtcttatggcttaccccaacaggctttggattggttcaaggccaatttgaacgctaacgccatcggtggtaaatgcaaccgtggtatgtcggtaccagactctgtgtccttgatgacaggaaaggaactgaatgaagaggaatactttaaggctgctacgttaggttggttgactgaattgttgcaagcttactggcttgtcagtgatgatattatggactcttctattaccagaagaggtgttccatgttggtataggcaaccagaagttggtatgatcgcaattaacgatgccttcatgttagaaagtgctatctacatattgttgaagaaatactttagatcccataagtcttatgttgacctaatggaattattccacgaggtcactttccaaactgaattgggccaaacttgtgacttgcttaccgctccagaagataaagttgatttggataatttttcaatggaaaagtacactttcatcgttatttacaaaacggcttattactctttttacttgccagttgccttagctttacatcaattgggtattgcaaccgagaagaaccttaagcaggccgaagctattttgatccctctaggtacatacttccaaattcaagacgactatttggataattttggtgacccagctcacatcggtaagataggtactgacatcctagataacaaatgttcctggttggtcaacaaagctttgttaattgcaacccctgaacaaagaaaggtactagaagaaaattacggtagaaagaataaggataacgaagctgtcgtgaaaaagttgtacaacgaactggcattggagaagttgtatcaagaatacgaagaatcggaggttactaaaattaagaagttaattgaagaaacagatgaaagcgaaggattaaagaaatctgtattcgagtccttcttgggtaagatctataagcgtactaagtaa

SEQ ID NO: 485 - DNA, 1059 bp, Artificial Sequence
  Synthetic
atggccgcattaacaaatggtcaggacaggagagctcgttttaccgctgtgttccctaaacttcaaaaggaactaatagagttcgttatcgctcaaggatttccacaagaagccttgtcttggttccaaagaaacctggaatataacgctccaggcggtaagttgaatcgtggtatgtccgtagtcgatacgttggaaattttgagaggtgagcccttatcggaagaagaatactttaaatcagctttgcttggttggtgtgtcgaactattgcaagccttcttcctggtttctgatgacattatggacacttccatcactagaagaggccaaccatgctggtacagagtcgagggtgttggtatgattgctatctgggatgctttcatgttggaaggtgccatttatcacttgttaaagagccattttcgtaaggattcttactacgttgatttattggacttgttccacgaaaccacttttcagacagaacttggtcaattgattgatttgatcaccgctccagaagaccatattgacttagacagattctctttaagaaaacaccaattgatagtcatctacaagactgcatattactcgttctaccttcctgttgctttggctatgtatatggccggtattcaagatcaagctgcctttaagcaagctcaggacatcctaataccattgggtgaatactttcaagttcaagatgactatttggattgttacggtgctcctgagttcatcggaaagattggtaccgacatcctggataacaagtgttcttggaatgtcaacgttgcactagctgcatgcaccccagaacaaagaagagtattggatgaaacttacggtaggaaagactccatctgtgaagccaaggttaaagaaattttcttagctgtcgatattccaggcaagtacgcagcttatgaacaacagtcatacgagaaaattaacggtttgatcgatggtattgctgaaacgccaggtggattaaagagagatgtgtttagagcattccttagtaagatatataaaagaactaagtaa

SEQ ID NO: 486 - DNA, 1044 bp, Artificial Sequence
  Synthetic
atggccactaaggctaccagagctgatttcgaaaaagtctttccctctctagttgaggaccttttaggcgaagcacgtaagtataacttgccagataatgctttgcagtggttcgaaaggtcactgaacgccaatacacctggtggtaaattaaacagaggaatgtccgtgccagacacgggtagccaattgttggaaagaccattgtctccagaagaatttaaggacttagctactttaggttggttgaccgaattgttgcaagcattctggcttgtatctgatgatattatggacgctagtataaccagaagaggtgaaccttgttggtaccgtagagaaggtgttggtatgatcgccattaacgattctttcatgttagagtccggcatctacttgattttgaagaagcattttagatcgcacccagcttatcttgacctaatcgaactattccacgaggtcacttggcaaactgaattaggtcaactgtgcgacttgataaccgctccagaagatcatgttgacttgaacaatttctccatggagaagtacacatttattgttatctacaaaacggcctattactcattctatttgccagtcgctttagctttacactacttgagattggctactcctcaaaatttgaaacaagcccatgatattctgattccattgggtgaatactttcaaatccaagatgactatctggatgcatttggagatccatcggtcattggtaagattggtactgatatcaaggacaacaagtgtggctggttgataaaccaagctctacagatctgtacccccgaacagagaaaggttttggacgaaaactacggtcaaaaggatgacgctaaggaagccaaagtgaaagaattgtataatgaactacaattggagaagcgttacagagattacgaagaaaagagggttggtgaaattagacaaatgattgctaatgtggacgagagtgctggactgaaaaaaggtgttttcgaagaatatctggctaagatctacaagagatctaagtaa

SEQ ID NO: 487 - DNA, 1044 bp, Artificial Sequence
  Synthetic
atggctaccaggatatctcgttcagaatttgaggcattcgtagccccacttattgaagaaatcattcagagcactgaacaatacaaattgcctgagaatgctagacaatggttcgaagcttcgctaaaggccaacatcgttggaggcaagatgaacagaggtatgtccgtcccagatacagcttctattttactgggtagaccattgactgctgacgaattgaagcacttagccttgttgggttggtttacggagttattgcaagctttcttcctggtttccgacgatattatggacagttctatcaccagaagaggtcaaccctgctggtatcgtcaagaaggtgtcggtttaattgcaatatgggatgcctttatgttggaatcagctatctacgttattcttaaaaagtatttcagatctcatccagcttacgtggatttgttggaattgttccacgaaactacctaccaaacagaattaggtcaactatgtgacttgatcactgctcctgaagataaggtcgacttagataatttttcgatggaaaaatacacctttatcgttaagtataagactgcatactactccttctacttaccagttactttggctttgcactatttgcaattggccacaccaaacaatcttaagcagtgtgaagacattttaatcccactgggagagtacttccaaattcaggatgactatcttgacgcattcggtttgccagaaaccatcggtaaaattggtactgatatccaagataacaaatgttcatggctagtaaaccaagctttgactatggtcacccccgaacaaagacaacttttgaacgaggcctacggtagaaaggattctgctctggaagctaaggttaaggctttgtataatgacttgaagttagaacaacattacttgaattttgaagaagaacgtgtcggtaatctgagaagacagatttcagccgtcgatgaatccgaaggtttaaagaaagaaatttttagtgctttcttggataaaatctacaagagatctaagtaa

SEQ ID NO: 488 - DNA, 1038 bp, Artificial Sequence
  Synthetic
atgcccgttactctaaaagaatttgagagtgtattccctcaattagtggaagacgttctggctcattgcaagcagtataatttgccagataacgcattgcaatggttcaagaactcacttaatcacaacaccgtcggtggaaagtgtaacaggggcatgtctgtcgttgacacgtcttccttgttactgggtcgtgatttgactaaagatgaatttttccactctgccacactaggttggatgattgaattgttacaagctttctttttggtcagcgacgacatcatggattcgtccaagaccagaagaggtagcccatgttggtaccttatgccagatgttggtatgatagctatttgggacgcctttatgttggaggcttccatctacgttcttttgaaaaagtatttcagacaaaataagcattacattgatttagtagaattgttccacgaagtcaccttccaaactgaattgggtcaggcttgtgacttactaactgccccagaagataaagttgacttggacaacttctctttggagaagtacacttttatcgtgatatataagaccgcttactactcattttatttgcctgttgctctagcattgtacttttgtgatcaagctacaccaaagaaccttcaaattgctaaggatatcttaattccaatgggtgaatacttccaaatccaagatgactatttagacaatttcgctgatcccactgtcttgggtaagattggcacggatattcaggataataaatgctcttggttagtcaaccaagcattgaagatcgccaccccagaacaaagacaagttttagaaaagaactatggtagaaaagatgctgcctgtgaagctgaagttaagaagctgtacgaggaattaaatttgaagaaaatttacgaagactatgaagaaaagagagtttctgaaataagggacatgatcgctaacattgacgagtctgaaggattgaaaaagtccgtatttgaagagttcttgcgtaaaatatacaaaagatcaaagtaa

SEQ ID NO: 489 - DNA, 1044 bp, Artificial Sequence
  Synthetic
atggccgcaaaaaccaatagggctgactttgagtcagtattcccttccctagtcaaggatgtttcggaccacgctatgcagtatggccttccatctgctgccttggaatggttccaaaacagcatgaacgctaacacacccggaggtaagttgaatcgtggtttatccgttccagatacgggtttggctctgttggaaaaaccattaaacgatgaacaatttaagcatctttgcactttgggttggatgactgaatttttgcaagccttcttcttggtgtctgacgacatgatggatagttctataaccagaagaggtgaaccatgttggtacagaagacctaacgtcggtatgattgctatctgggatgcattcatgttagagtctactatctacgtcttgttgaagaaacacttcagatcccatccagcttatgttgactttttagaactattccacgaagtctctttccaaaccgaattaggtcaattgtgtgatctactaactgcaccagaagacaatgttgacttgaacaactttaatatggataagttcaatttcattgttatttacaagaccgcttactactctttttatttgccagttgctctggccctacattacttgcaattggctacacctagtaacttgaggcaggcacacgatatcttaattccacttggtcaatactttcaagcccaagacgattatttggacgtcttcggaaagccagaacaaatcggtaagattggtactgatattcaggacaataagtgttcatgggttatcaaccaagctttaaaaagatgttccgctgaacaaagaaaggtgttagacgaatcctatggtcgtaaagatgctgctatggaggccaaagtcaaggtggtttttaacgagttgaacttggaaaaggtttacagagatttcgaagaagaacaagtcggtaagatcagaaccatgattgctggtttggatgagtccgaaggtttaaagaaaggcgttttcgaatcttttttagccaaaatatacaagagggacaaataa

SEQ ID NO: 490 - DNA, 1044 bp, Artificial Sequence
  Synthetic
atggctaagtctgcatcgctagagaaattcgaatcaatctttcccacgttagttgaagacgtgttggcccactccaagagctacggtttgcctcagcaagctcttgattggttcaagaacaatttgaacgctaatgccattggcggtaagtgcaaccgtggtatgtctgtcccagatagtgtttccctgatgactggtaaagaattaaacgaagaagaatattttaaggctgccacattgggatggttgaccgaattacttcaagcatacttcttggtatccgacgacataatggattcttctatcaccaggagaggtgttccatgttggtatagacaaccagaggtcggtatgattgctatttgggatgctttcatgttagaaagtgctatctacatattgttgaaaaagtactttagatcgcataagtcatacgtcgatttgatggaactattccacgaagttacttttcaaactgaattgggtcaaacttgtgacttgttaaccgccccagaagacaaagttgatttagacaatttctctatggagaagtatacattcattgtcatctataagaccgcttactactctttttatctgcctgttgcattagctttgcatcaattgggtattgctactgaaaagaacttgaaacaggctgaagctattctaatcccacttggtacttactttcaaatccaagatgactacttggataacttcggtgacccagaacacattggcaagataggtaccgatatcctagataataagtgttcatggttggtaaacaaagctcttttgattgccactcctgaacaaagaaaagtgctggaggagaactacggcagaaagaataaagacaacgaagccgtcgttaagaagttgtacgatgaactagctttggaaaaactgtatcaagaatatgaagagagtgaagtaggtaagattcgtaagctaatcgatggtacagatgaatccgaaggtttaaagaagtctgttttcgaatctttcttgggtaaaatctataaaagaaccaaataa

SEQ ID NO: 491 - DNA, 1056 bp, Artificial Sequence
  Synthetic
atgtcgaaggaatccaatcgtgctaaatttgttgcagagttccctgaactggtgaaggaactaaagtcagtcttgacaggatacggcatgccagctgaagccgttaaatggtatgaggattctcttaactacaacaccccaggtggtaagttgaacagaggtttaagcgtagtcgacacgtacgctattttgaaaggttatgccagtgttgatgacttacccgttgaagtctacaagaaggttgctttgcttggttggtgtatcgaattgttgcaagcttatttcttggtggctgacgatatgatggatcagtctataactagaaggggtcaaccatgctggtacagagtgaaggaagtcggtgatattgcaatctgggacgcctttatgttagaaggcgctatttatgtcctattgaaaaagcacttcagacaagagccatactacgttgacctgatcgaattgttccatgacgttacttttcaaaccgaattaggtcaattgttagatttgattactgctcctgaagacaaggttgatctgtctaaattctccttggaaaagcactctttcatcgttacctttaaaactgcttactatagtttctatctacccgtcgccctagctatgtacgtagccggtatttccgatccaaaggacttgcaacaggcacatgatgttttgattccattaggtgaatacttccaaatacaagatgactacttggactgttttggtaccgctgagcaaatcggtaaaattggtacggatatccaggacaataagtgtagttgggtcgttaacaaggctctacaacttgcatctccagaacaaagaaagttgttggacgaaaattatggcaaaaaggatgctgaatgcgaagccagatgtaaaaagttattccacgatttggacatccaaaagcattaccaagcttacgaggaaaaggtagcccaggaccttagagctaagatagcccaaactgatgaatcacgtggtttcagagcccaagtcttgacagcttttttgaacaaggtttacaagaggtctaaataa

SEQ ID NO: 492 - DNA, 1044 bp, Artificial Sequence
  Synthetic
atggctcaacagacaaccctacaagagtttaactcggtgtaccctaagttggaagaagcattactggatcatgctcgttcttataaacttccccaagaacaattggactggtacaagagatcattagaagtaaatccattgggtggaaagtgtaacagaggtatgtccgttccagattctgtcagcttgttgttggaaaaaccacttactgaagagcaatacttccaggccgctacgttaggttggatgactgaattgctacaagccttctttttggttagtgacgatataatggactcctctatcaccagaaggggccaaccatgctggtatagacaagaaggtgttggaatgattgctatttgggatgctttcatgctggaatctgccatctacactctattaaagaagtacttcagatcccaccctgcttatgtcgatttaattgaattgtttcacgaaacaactttccaaaccgaattgggtcaactttgtgacttgttaaccgcccccgaggacaatgtcaacttggataactttagtttggaaaaatactctttcatcgttatatataagactgcttactattctttttacttaccagttgctttggcattgcatcaacttaatttagccactccaagcaacttaaaacaagctgaagacattctgatcccattgggtgagtacttccagattcaagatgattatttggataacttcggcaagccagaacacattggtaagataggtaccgacattaaggacaataagtgttcctggttggtaaatcaagctttggctgtcgctactccagaacagcgtaaaatcttggaggaaaactacggtagaaaggacgacgaaaaggaaaaagttgtgaagaaactatacgatgaccttaacttggaacaaagatatttggattacgaggaaaaagttgtcggtcaaatcagagaacgtatcgcaaacattgatgaaaatgaaggtcttaagaagacggtgtttgaagcattcctggctaaaatttacaagagaagtaagtaa

SEQ ID NO: 493 - DNA, 1056 bp, Artificial Sequence
  Synthetic
atgtcgaaggaagacaaacgtaataagtttttatctgtcttccctcaattggttgatgagcttaaatccatcttggctggatacggcatgacgcaggatgcactacaatggtatgaaaactcactgaactacaatacaccaggtggtaagttgaacaggggtctatctgtagttgacacttacgctattttaaagggtaaaagctcctatgaagaattgtctgaagaagagtacttcaagttggccatgttaggttggtgtatagaattgttgcaagcttattggcttgtggccgatgacatgatggataagtctattaccagaagaggtcaaccatgctggtacagagttcccgaagtcggtgaagttgctatcaacgacgcttttatgttggagggcgctatttattgtttattgaagaatcacttcaaaaaggaagcatactacgtcgacttattggaattattccatgatgttacttttcagaccgaattgggtcaaatgcttgatttgatcactgccccagaagacagagttgatctggacaagttcagcttggagagacacagtttcatcgtcagatttaaaaccgcttattactcattttacttaccagtcgctttggctatgtacgtagccggtgtttccgatgaacaagacttaaagcaagcacaagacgttttgattcctctaggtgaatatttccagatccaagatgatttcttggattgttttggtaagccagaagacattggtaagataggaactgatatacaagataacaagtgctcttgggtcgttaacactgccttgaaactgtgttccgctgaacaacgtaaagtactggacgctaattatggaagaaagaacagtgaatctgaggctaagtgtaagcaagtttttgatgatttgaagatcgacagtatttaccatgactatgaagagaaaaccgcacaaaatttaagaaatatgattcagaacacagatgaaaccaggggtttcaagtctcaagtgttgactgtctttcttgaaaaagtctacaagagaaaaaagtaa

SEQ ID NO: 494 - DNA, 1053 bp, Artificial Sequence
  Synthetic
atggataaggctgccgcacgtcaaaaatttgttgctgaatttgacaatctagtaaaggagcttcaggaaatatctgctggttataacatgcctaaggaagccattgaatggttcacgaaaaacctggaatacaacaccccaggcggtaagttaaatagaggtttgtccgttatcgatacatactgcatcttgaagaacaagactgtcgagagtttggctgctgacgaatacaaaaaggtggctttattgggttgggcaattgaattgcttcaagcttatttcttggtcgccgatgacatgatggatcaaagcaagaccagaagaggacaaccatgttggtacttagctgaaggtgttggtaatatcgccatttgggactcgttcatgttggaaggtgctatatacattttattgaagaaacacttcaggcaagatctatattacgttgacctattggatttgtttcatgaagtcacttttcagactgagctgggccaattgctggatttagtaaccgccgacgaagaacacgttgatctgtccaagttctctttggaaaagcattcattcatcgtcatttttaaaactgcttattactctttctatttgcccgttgccttagctatgtacatgtgtggtatcaactctgatgaggacttgaaacaagtgaaggacgttttaattccactaggtgaatacttccaaattcaagatgattatttggactgttttggtacaccagaacagatcggtaaaattggcaccgatatcaaggacaataagtgttcatgggtcgttaaccaagctctacttaaagctaatgaatcccaaagacaagttttggacgataactacggtaagaaagatgacgaatctgagcaaagagtcaaggatcttttcgcagaattgcagataccttccatttacgaacaatacgaggaagaagtggttgcaaagttacgtgctcaaatcgaaaagatagacgaatcgagaggtctaaagaaggaagtcttgtcttcttttctggccaaggtctataaaagatcaaagtaa

SEQ ID NO: 495 - DNA, 1137 bp, Artificial Sequence
  Synthetic
atgcctgcacccaccaatccaacagagatagccctgcaagcttcgactactaacggtatgagtagcgctgaaaagaaaaagcaggctcgtgccaaattcgaaggagtttatcaagtacttagaaaggacctattggatcactttgctggtgaaggcatgccaaaggacgctatcgaatggtactctaggaacttggattacaacgtgccaggtggtaagttgaatagaggtatgtccgtcgtcgattctgttgaaattattaagggtagagctttaaccgacgaagagtatttgaaatctgcaatcttaggttggtgcattgaattgctacaagccttctttttggtttccgatgacttaatggatagttctgtcacgagaagaggtcaaccatgttggtacagagtagaaaacgttggtctgatctctatctgggacgctttcatgctagaaggtgctatttaccatttgttgaagaaatattttagacaagactcatactacgttgaattattggacttgttccacgatgttacttacaagaccgaaatgggccagttaatcgatttgattaccgcccctgaggatcatgttgatttggacaagttctcgcttaagaaacatcaattgatagtcatttataagactgctttttactctttctacttgccagttgctttagcaatgcacgtctgtggcataccaccatcccctaactcaccatctgatccctacaagctggctcacgaaattctaatcccacttggtgaatatttccaagttcaagacgatttcctagactttggtggtacaccagagcaaatcggtaaaattggtacagatatattagacaacaagtgttcctggtgcatcaatactgcattggctgtggccactttggaacaaaggcgtgtcttggatgaaaactatggtagaaaggacgctgctaaagaagccaaagtgaaggaagtttttgagcaggtcgaaattagaagacgttacgaagaatacgaacaaaccgcatatgaaagaatcaatggattaattgaaacgatccctgctgatgctaaggacggtgagttgaagagagaagttttcaccagcttcttgtccaaaatttacaaaagaactaagtaa

SEQ ID NO: 496 - DNA, 1056 bp, Artificial Sequence
  Synthetic
atggataaatccacagctcgtagtaagtttttagacgtgttcccagaacttgtttctgatctggagactgtcaccaaggaatacggtatgcctcaggacgccatcgaatggttcaagagaaacttgaattataacactccaggaggcaaattgaacaggggtttgtcggttgtagatacctacgctttactaaagggttataagagctttgacgacttcgaaccagaggaatacaaaaagactgcaattttgggttgggctgttgaattattgcaagcctacttcttggtcgctgatgatatgatggacaaatcaataacgagaagaggtcaaccttgttggtacagagttgatggtgtgaatgaaattgctatctgggattcttttatgctagaagctgcaatttatgtcttgttaaagaagtacttcagaaaagactcctattacgttgacttgttggagctttttcatgaagtcaccttccaaactgaacttggtcaattgctggatttgctaactgccccagaagatcacgttgatttgtctaagttctctttatccaagcacagtttcatcgtcacatttaagacagcttactactcgttttatttaccagtagccttggctatgtatatggccggtgtttccgacgaaaaggacttgaaacaagctcaagatgttcttatccccttgggtgaatacttccagattcaagacgattatttagactgcttcggtaagccagaagacattggtaaaataggtaccgatatactagataacaagtgttcatgggtcattaatactgctttgaagatctgtaccccagagcaaagagccatcttggatgaaaactacggcaggaaggattcagctaaggaagctaagtgcaagcaaatttttaaggatctaaaaatcgaccaattatatttggaatacgaagaaaaggttgccaccgagttaagatctaaaattgctaacgtggatgaatctcgtggttttaaaggtgaagttttgactagcttcttgaataaaatttacaagagacaaaaataa

SEQ ID NO: 497 - DNA, 1044 bp, Artificial Sequence
  Synthetic
atggcaacgaggatctcccgtagtgaatttgagggattcgtacaccccctgattaaggacatacttgaagccacagaacagtataacctaccagaaaatgctagaaaatggttctcggattcattgaacgctaacattgtgggtggtaagatgaatagaggtatgtctgtcccagataccggctccatcttattgggtagacctttaactgacgaagaaaagaaacatttgagcttgttgggttggtttactgagttactacaagctttcttcttggtttctgacgatattatggacggttccatcaccagaagaggtcaaccatgttggtacagaagagaaggcgttggtatgattgccatttgggatgcttttatgttggaatctgccatctacgttatactgaagaagtacttcagatctcacccagcttatactgatttgttggaactatttcatgaaaccacttggcaaactgaactgggtcaattatgcgacttgattaccgctcctgaggaccacgtcgatttgaacaacttctcgatggaaaagtacacattcatcgtcaaatacaaaacggcatattacagcttctatctaccagttactttggctttacattaccttcaagttgcaaccccaaagaatttgaagcaatgtgaagatattttgatacctcttggtgagtattttcagatccaagacgactacttagatgctttcggttctccagaaactattggcaaaatcggtacagatattcaagataacaagtgttcttggttggtcaaccgtgctctaaccattgtaactccagaacaaagaaagttgttggacgaagcctacggtcgtaaggactcagctttagaagctaaagtcaaggccttgtataatgatatcaagttagaacaacactacttgaagtttgaagagcagagagttggacaattaaggcaacaaatagaggctgttgatgaatctgaaggtttgaaaaaggaagtttttagtgccttcctggaaaagatctacaagagatccaagtaa

SEQ ID NO: 498 - DNA, 1140 bp, Artificial Sequence
  Synthetic
atgggtgccgaccgtcaggcatttgaaggcttcttcccacaagtggttagggatctgacggctgatggtctaagacaccccgaggtaggtgacgctgtcgctagattgaaggaagttcttgaatacaattctcctggaggtaaacataccagaggtttgactgtcttagccgcatttagaagattggttcaaccagaacaacaaggtccagattcagttcgttgtgccttggctgtcggttggtgcatagagttattgcaagctttctttttggtagctgacgacattatggatagctctttaacaagaagaggtcaaccatgttggtataagaaggaaggtatcggcttggacgctgtttgggattccttcctacttgaatcgagtatttacaggttgctgaaaaagtattgtagaggtcagccatactacttacaccttttggaattgttcctgcaaacttcttaccaaaccgaattgggtcaagcattggacttaatcaccgctcctccaactcaagttgatttggccagattcacagaacaaagatataaggctatcgtcaaatacaagactgctttttatagtttctaccttccagtcgccgcagctatgtatatggctggaattgaatctgaagaggaacatgcaaacgccaaagctatattgctagaaatgggcgaatttttccagatccaagatgacttcttagactgttttggtgaccctagcttaaccggtaagattggtactgatatacaagataacaagtgttcctggttggttgtcgaatgcctgagaagagcttccccagagcaaaggaaacttttggaagagaattacggacaaaaggaattggaaaaggtcgccagagttaaagaactatacgaagctttgggtttgagagcagtttaccaggaatatgaagactctagtttccaacacttgcaacaactaattgaagttcatactccacacttacccaaggagatcttcttggatcttgctcatgtgatctacaagcgtcagaacgagcaccgttctgcttcctgttgtccagatgcctgggctagaacgggtagacaacaagtccaaaccgccgctacctggcaaagagttgtcgatgatttgtctggttaa

SEQ ID NO: 499 - DNA, 1044 bp, Artificial Sequence
  Synthetic
atggcctctactacaaagcgtgctgactttgaagcagttttccccggactagctaaagatattttagagcacgctaagagatataacctgcctgccaatgctttggaatggttcgaaaaatccttgtttgctaacaccccaggcggtaagcttaacaggggtttgagtgtaccagacactggtttggccttattgaagaagccactgaccgaagaacagttcgaacatctatcaatattgggttggcttactgagttgttgcaagctttctggttagtctcggatgacatcatggattcctctatcacgagaagaggtcaaccatgttggtacagacaagaaggtgtgggattaattgcaattaatgatgctttcatgttggaatctgcaatctacttgattttgaaacaaagatttagaagccacccagcttacatagatctagttgaactttttcatgaaactacctggcaaacagaattgggtcaattatgcgacttgattaccgctcctgaagaccacgttaacttagacaatttctctatggagaagtatatgtttatcgtcacttacaagacggcttattactcattctatttgccagttgccttagctttgttatacttgcaggttgcaactccagagactcttaaacaagctcatgatattttgatcccactgggtcaatacttccaaatccaggatgattatttggacaactttggcgatccttccgtcattggtaagattggtaccgatatacaagacaacaaatgttcttggttagttaaccaagccatcgctagagctacaccagaacaaagggccgtgttggacagcgcctacggtagaaaggacaaggaacaagaattgaaggtaaaaaagatatttgacgatttggaattagaaaaggtctacaaagaatacgaggaaaaggttgtcggtgaattgcgtgctaagattgctgccgttgacgaaaccactggcctaaagaaagaggttttcgaatcgtttttggctaagatctataaaagaacaaagtaa

SEQ ID NO: 500 - DNA, 1062 bp, Artificial Sequence
  Synthetic
atgtctgccgcactgacaaatggtcaggatcgtagagctaggttcaccgctgtctttccaaagttagagaaagaactacttgacttcgttacggctcaaggctttcctcaagaagccatcagctggttccaaagaaacttggattataacgctccaggtggtaagttgaatagaggaatgtccgtggttgactcattggaaatattaagaggtggtcccttgagtgaagaggaatactttaaatcggctttgttgggttggtgtgtagaattgttacaagccttctttttagtcagtgacgatattatggactcttctatcactagacgtggtcaaccatgctggtacagagttgaaggcattggtatgattgctatctgggattccttcatgcttgaaggttctatttatcatttgctgaagtcccacttcagaaaggattcttactacgttgatttgttggacttgtttcacgagactaccttccaaaccgaactaggtcagttaattgaccttatcactgcaccagaagaccatatagatttgaacagattctcattgaggaaacaccaactaattgtcatctacaagactgcttattactcattttatttgcctgttgcattagctatgcatatggcaggtatcaaggacgaagctgctttcaagcacgcccaagatatcttgattccattaggtgaatacttccaagtccaagatgattacctggactgttatggcgctccagaatttattggtaaaataggtactgacattttagataataagtgttcgtggaacgtcaacgttgctttggccaactgttctcccgaacagagaaaggttttggacgaaaattacggtagaaaggacgctgcctgcgaggccaaggttaaagaagtgtttctggctgtcgatatcccaggaaaatatgctgtatacgagcaagaaagctatgaaaagattaacggtttaattaacgctatcgatgaaacccctggaggtttgaagagagatgttttcagagctttcttagccaagatctacaaacgtacaaagtaa

SEQ ID NO: 501 - DNA, 1065 bp, Artificial Sequence
  Synthetic
atggtagccgctaccaatagtttgtcaaaagaagataagagagctaagttcgaggcagtttttccaattttagttgacgaaatagtggattatctaacaagcgtcaacgtccctcaagacgctaaggattggttcaaaaagtctctttaccataacactttgggtggaaagtacaataggggcttgtctgttatcgacacttacgaaattctgtcgggtaaagccttggacgataactcttattttcgtgctgccttattgggttggtgcatcgaattgcttcaggctttctggttagtcgctgatgacatgatggatgaatccaagacgagaagaggtcaaccatgttggtacttaatgcccaacgttggttccattgctattaacgattcattcatgttggaaagtgctatctactttttgttaaagaagcacttcagacacgaaacctattacgttgacctgcttgatttgttccatgaggtcacttttcaaactaccctaggtcaagaattggatttgttgaccgccccagaaaatcacgtagacctgtccaagttctctcaagacaaacacgctttcattgttatctttaagacagcctactattctttttacttgccagtggcactagcaatgtgtatggctaacgtcgctactccagataatttgcaacgtgcttcggatgtcttgattcctttgggtaaatattttcaaatccaggacgattacttagactgttatggcgatccatctgttacaggtaaggttggtactgacatactggataacaaatgttcctggctaatcaatgtggcattggctaaggcctcacccgagcaaagaaaggttttagacgaaaattacggtagaaaggacgccgattgcgaaaaaagagttaaggctgtcttcgaagaattgaacttaaagaaggcttacgaagaatacgaagagtctgaggtatccaccataaaacaaagaatttctgttctggatgaatccgccggtttgaagaaagaagctttcactacctttttaaacaagatttataagagaagtaaataa

SEQ ID NO: 502 - DNA, 1050 bp, Artificial Sequence
  Synthetic
atggcagataaggccgctgtaaaacagaagtttatcgactcattcgatccattagtcgaggacttgcttgctgtgttgaagcaatacaacataagtcccgaagctactgaatggttcaaaaagtccctatattacaatggtgttggcggtaagttgaacagaggtttatcggtcattgatacctatcaaattttgacaggtaaaaatgaactgacggacgaagaatacaagaaggccgctgttttgggatggggtatcgaactattgcaaggttttttcttagtttctgacgatattatggatgcttctaaaactaggcgtggtcaaccttgctggtacttggttccaaaggtcggtatgatcgcaatttgggacgcctttatgctagagactgctatttatttcttgcttaagaaatacttcagaagcgaaccttactatattgacttagttgaattgtttcacgatgttaccttccaaaccgaattgggccagctgttggacttgatcactgctccagaggatgaagtcgatttgtctaagttctccctagccaagcattcatttatcgtaatatacaaaacagcttactattctttttacttaccagtcgccttagctatgtatatggccggtgtttccaagccagaagacttgaagcaagctcacgacgtattaataccattgggtgaatacttccaaatccaagatgactacctggattgttatggtgatcccgcattcattggcaagatcggtaccgatatcctggacaacaaatgttcttggttgattaatactgctcttaaaaaggctaacccagaacaaagaaagattttggacgaaaactacggtcagaagaacggagcttgtgaggcaaaagttaaagctgtctacaacgaattggatttggaaaatgaatacttcaagtatgaagaagatgccgttggacgtatcaagactctgattgacaacgttgatgaatccagaggttttaagaaggacgtgcttagtgcttttttggctaagatatacaagagacaaaagtaa

SEQ ID NO: 503 - DNA, 1041 bp, Artificial Sequence
  Synthetic
atgacttcgaagagtgaattggagctattcttatccctgtacgaaccattgaaagctcaaatagttagcgacttggaaaactttgaagcaaatcaggagatggtggaaagaatcaagttagtaatggattattctattttgggtggcaagatgaaccgtggaatttctgttctttcaacagtcaaactaatcaagggtgaatctattaccaaagatttgcaagaaaaggccatcattttaggttggtgtatcgaatggttgcaagctttctttttggtcgctgacgatattatggacgattcccctatgagaagaggtaagcccgcctggtacaggaacgataatgttggtatgatcgcaatctgggactctttcttaattgaatccttcatatttagaatattgaaaattcacttcagacaacaatcatattacatcgatttgattgaactttttcacgaggtcatctaccaaacggaattaggtcagatgttggacctgattacctctccaactagcgttaacttggatttgttcaatttggacaagcatcattttatcgttaagtataagacttctttctacagtttttatcttccagtggctttggctcttctagcttgcggtgaaacacctgactccaaatcgttcgatatctctcgtgatattttggtcccaatgggtgtttacttccaagttcaagatgactacttagatctatatggagatgtcaagttgactggtaaagtcggtaccgacatcaaggacaacaagtgttcctggttagttattaaggccttatccaagtgtaatccagaacaaagaaaaattttggacttgcactacggtaagaaatccgatgaagacgaggctatcgttaagaagctgtaccaagaattggatgttcagggcatgttcttggaatacgccaacgaaaccgaggctcatttgaacaacatgataagcaatgtcgacaagtccgaaattaatccacaaattttctattcttttttgaacaagatatctcacagacaaaaataa

SEQ ID NO: 504 - DNA, 1059 bp, Artificial Sequence
  Synthetic
atggccagtgagaaagaaataagacgtgaaagattcttaaatgtttttccaaagcttgtcgaagaactaaacgcatctctgttggcttatggtatgcctaaggaagcttgcgactggtacgctcattccttgaactacaatacaccaggcggtaaattgaacagaggattatcagtagtcgatacctatgccatcttgtctaacaagacggttgaacagttgggtcaagaagagtacgaaaaggtggctattttgggttggtgtattgagcttttacaagcttacttcttggttgctgatgacatgatggataaatcaatcactagaaggggtcaaccatgttggtacaaggttcctgaagtaggtgaaattgccatctgggacgcctttatgttggaagctgcaatttataagctactaaagtcgcacttcagaaatgaaaaatactatatcgatattaccgagttgttccacgaagtcacttttcaaactgaacttggtcaattaatggacttgataaccgctccagaagacaaggttgatctatctaagttttccttgaagaagcattctttcattgtcactttcaagacagcttactattccttttacttacccgttgccctggctatgtatgtcgccggcatcaccgatgaaaaagacttgaaacaagctcgtgatgttttgattccattgggtgagtacttccagatccaagacgattacttagactgtttcggtactccagaacaaatcggtaagatcggtacagacattcaagataacaagtgcagctgggttattaataaagctcttgaattggcttccgccgaacagaggaagactttggacgaaaactatggtaagaaggattctgtagctgaagctaaatgtaagaaaatcttcaatgatctaaaaattgagcaattgtaccacgaatacgaagaatctatcgccaaggatcttaaggcaaaaatttctcaagtcgacgagagtagaggctttaaggctgatgtgttaaccgcattcttgaacaaggtgtacaaaagatccaagtaa

SEQ ID NO: 505 - DNA, 1044 bp, Artificial Sequence
  Synthetic
atggctaaaagcgcagctttggagaagtttgaatctattttccccacgctggttgaagatgtcttagcccactccaagagttacaatctaccacagcaagccttggactggttcaaaaactctcttaacgctaacgctatcggcggtaagtgcaatcgtggaatgtcagtaccagactccgtggctttgatgacaggtaaagaattgtctgaagatgagtattttcatgccgcaactttaggttggatgactgaattgttgcaagctttctggttagtctcggacgatataatggattctagcattaccagaagaggtgctccttgttggtacagacaaccagaagttggtatgattgctatcaacgatgccttcatgttagaagctgctatctatattttgttgaagaagtactttaggcaacacaagtcctacgttgacctacttgaattgttccacgaagtcacctttcaaactgaattaggtcaaacctgtgacctattgactgctccagaggataaagttgacctggacaatttctccatggaaaagtatactttcatagtgatctacaagaccgcctattacagtttctacttgcctgttgctttagccctacatcagttaggtattgctacagaaaagaacttgaaacaagctgaagatattttgatcccactgggtacttattttcaaatacaagacgattacttggataacttcggtaatccagaacacatcggaaagattggcactgacatcttggataacaagtgttcttggcttgtcaataaggctttgcttattgccaccccagagcaacgtaaagttttagaagaaaactatggtagaaagaataaggataacgaagcagttgtcaagaaattgtacgatgaattagctttggaaaaattgtaccaggagtacgaagaggctgaagtcggtaaaattagaaagttaatcgaagaagttgacgagtctgaaggtcttaagaagtcagttttcgaatcctttttgggtaagatctataaaagaaccaagtaa

SEQ ID NO: 506 - DNA, 1044 bp, Artificial Sequence
  Synthetic
atgggtaaaaccactttaaaggagtttgaagcagtcttcccacttctagtggacgaaattatggccgttctggaaggatacaagatctcatcggaagctgctgcttggtatagaaaggtcttggaacacaacacagttggtggtaagtgtaatcgtggtatgtctgtagttgatacttactccacgttgaccaaccaagataaattgagcgacgaagactatttgaggtctgccatattaggctggtgcactgaattgttacaggctttctttttggttagtgatgatattatggacggttccaagaccagaagaggttccccttgttggtacttgcatgaaggtgtaggcaatatcgccatttgggatgctttcatgttggagtctgctatctacatattactaaagaaacacttcagaaacactccatactatattgacctaatcgaactttttcatgatgtttctttccaaacagaattgggtcaattgctggacttgattaccgctcccgaagacagagtcgatttgtcaaagttttctttggaaaagcactcattcatcgtcattttcaaaactgcctactatagcttctaccttccagtagccttagctatgtatatggctggtgttgctactccagaaaatttaaagcaagcacatgatgttttaattccattgggtgaatactttcaaatccaggatgactatttggactgttacggtgaccctgaacacatcggaaagataggtaccgatattaaagataacaaatgcggttggctaataaaccaagctttggctattgcaacgccagaacaaagacaagtccttgatgataactacggcaagaaggatgacgtcgccgaggctagagttaagaaagtttttctggacttggaattggagaaacgttaccaagattacgaggaaactgtggttggtaagattagaactcttatcgaaggtattgacgaaaccaccggatttaagaaggacgtcctgactaatttcttgaacaaaatctataagagatctaagtaa

SEQ ID NO: 507 - DNA, 1056 bp, Artificial Sequence
  Synthetic
atgtctgccgaggataaaagaaacaagttcctaggtgtttttcctgcattggtagacgaattaaagagcatcttgtcaggctacggtatgacagaagacgctctgaagtggtatgaagattctttaaattacaacactccaggtggaaaattgaataggggtttgtcggtggtcgacacctacgctatattgaagggtaaaaagtcttatgctgatttgtccgatgaagaatacttcaagcttgccattcttggttggtgcattgaattattgcaagcttattggttagtcgctgacgatatgatggataaaagtatcactcgtagaggtcagccatgttggtacagagttcccgaggttggtgaaattgccataaacgacgcttttatgctggaaggtgccatctactgtctattgaagaagcatttcagatccgaatcatattacgttgatttgttggagttattccacgacgtcacctttcaaacggaacttggtcaactgttggacttaattactgctccagaagatagagttgatttggataagttctccttagaacgtcactcttttatcgttagattcaagaccgcatactattctttctacttgccagtcgctcttgctatgtacgccgctggtattaacagtgagcatgacttgcaacaagcccaagcagtattgatcccattaggcgaatactttcagattcaagatgactttttggattgtttcggtaaacctgaagatattggaaaaatcggtaccgacattcaagataacaagtgttcatgggttatcaatactgcacttaagttgtgttctgctgaccaaagaaaggtcttggacgaaaattatggtagaaaagacgctgaatctgaagctagatgcaagcacgtgttccacgatttgaagatagattctttgtatttggagtacgaagaaaagactgcccatgacctaagaaacttaatacaaaacacagacgaaagcaggggcttcaaagctcaagttttaaccgctttcctagaaaaggtatacaagcgtaaaaagtaa

SEQ ID NO: 508 - DNA, 1044 bp, Artificial Sequence
  Synthetic
atgccaacgacaatcaaggagttcgaaagtgtgtggcccagaattgttgccgatttacaggaccattgcaaacaatataagctacctcaacaatccttggattggtttactaaatcgctggactacaacaccgtcggtggaaagtgtaatcgtggtatgtcagttatagacaccactagcatcttgcaaggcaagactttggatccatcctctgaagaatacttcagagctgcacttttgggttggatgattgaattattacaagcttttttcttggtcagtgacgatattatggattcttctaagacaagaaggggtagcccatgttggtatttggctcctaaggtaggtatgatcgccatttgggacgcttttatgttggaatcttccatctacgttctattaaaaaagcacttcagacaagaaacctcttacgttgacatcgttgagttgttccacgaagtcacttttcagaccgaatgtggtcaattatgtgatcttcttactgctccagaagacgatgttaacttggacaatttctcgttggataaattcacctttattgtcatctataagacggcctactactcattctatctgccagttgctctagctttgtactatgcaggagccgctacgccaaagaacctgaaaactgctgaagatattttggtgccaatgggtgagtactttcaagcacaagatgactatttggatgcttttgccgacccttctgtcttaggtaagataggtactgacattatggataataagtgttcttggttggttaaccaagctttgaagaaggttaacccagaacaaagaaaattgttagatgaaaactacggtcaaaaggattcacaaaaagaagctaaggttaaggaactttaccatgaattgaagcttaaggaattttatgaacagtgggaagaagatagagtagccgatttgcgtgcaaagatcgctcaagtcgacgagtccgagggtttgaaaaaggatatattcgagctattcctacaaaaaatttacaagagatctaaataa

SEQ ID NO: 509 - DNA, 1044 bp, Artificial Sequence
  Synthetic
atggcctcaacaactaagcgtgctgatttcgaggcagtctttccaggcttggctaaagacatactagaacatgctaagaggtataacttacctgccaatgctctggaatggttcgaaaagtccttgtttgtaaacaccccaggtggtaaacttaacagaggattatcggtgcccgacacgggtttggctttgctacagaagccattgaccgatgaacaattcgagcacttgagtattttaggttggttgactgaattgttgcaagctttctggctagtttctgatgacatcatggactcctcaatcactagaagaggtcaaccatgttggtacagacacgaaggtgttggtttaattgcaatcaatgatgcttttatgctggaaagcgccatttacttgatattaaaacaaagattcaagtctcatccttcttacattgatttggttgaactatttcacgagactacctggcaaaccgaattaggtcaattgtgcgacttgatcacagctccagaagataatgtcaaccttgacaacttctctatggaaaaatatatgttcattgtcacatacaagactgcctactattccttttacttgccagttgctttggcattattataccttcaggttgctacgcccgaaacccttaaacaagcccacgatatcttgattcctttgggtcaatatttccaaatccaggacgattatttggataactttggtgacccatcagtcatcggcaagattggaactgatatacaagataataagtgttcttggttggtaaatcaggctattgctcgtgccactccagaacaaagagctgtattggactcggcttacggtagaaaggacaaggtgcaagaagcaaaggtcaagaaaattttcgatgaactggaattggagaaggtttataaagagtacgaagaaaaggttgtcggtgaactaagagccaagatagctgctgtcgacgaaaccactggtttaaagaaggaggtttttgaatcttttcttgccaaaatctacaagagaacgaagtaa

SEQ ID NO: 510 - DNA, 1041 bp, Artificial Sequence
  Synthetic
atgacaaccacgcagagggctgatttcgaggccgtgtttccttcattggcacaagaccttttagatcacgctaagaaatataacctaccagacaatgctctggaatggttcaacaatgctttgcatgtaaacgttccaggtggaaagttgaatagaggtttgagcgttccagatactggtttagccttgttacaaaagcccttgactgacgaacaatttaaacacttatccaccttgggctggctgactgaattattgcaagctttctttcttgtctctgatgacatcatggattcttccattaccagaagaggtcaaccatgttggtaccgtcatcaaggcgttggtttgatagctatttgggacgcattcatgttggaatcgggtatttacgtcatcctaaagaaacacttcagaagtcaccctgcctatatcgatttggtcgagctatttcatgaaactgcatggcagaccgaactgggtcaattgtgcgacttgatcacagctcctgaagaccacgtagatttggataacttctctatggaaaagtacatgttcatagttacttataagactgcttactacagtttttatttaccagtcgctctagctttgcattacctacaattggctacgccagaaaacttgaagcaaacacacgatattctgattccattaggacaatacttccaggttcaagacgattacttggatgcttatggtgacccagccgttattggtaaaattggtaccgacatcaaggacaataagtgttcttggatcatcaaccaagctttgcaattagcctccgctgaacagagaaagactcttgatgccgcctacggtagaaaagatgatgagttggaagccaaggttaaggttatttacagagaattaaacctagaaaaagtctatcaagactatgaagagaaggtggttggcgaaatcagaactaagattggtgctttggatgaatctcaaggtctaaagaaaggtgtttttgaggctttcttgtccaagatatacaagcgttcaaagtaa

SEQ ID NO: 511 - DNA, 1077 bp, Artificial Sequence
  Synthetic
atgtcttcaaaagctgaaaagagggcacgtttcgaccatgtgtttgaggtcataagagatgaattggttgaatatttcaaggctcagggcatgcctcaagacgccaccgaatggtacatcaaaaatctaaactacaacgtacccggtggaaagctgaacagaggtcttagcgttgtcgattcggttgagattttgaagggtagagctttgacggaagatgaatactttaaggctgccgtcttaggttggtgcgttgaattgttacaagctttcttcttggtttctgacgatgttatggactcctccatcactagaagaggtcaaccatgttggtatagaaatgaaggtgtaggtttggtcgctatttgggatgcatttattttagaagccgctatttactggctattgaaaaagcacttcagagccgatccaagttacatcaacttggtagaattatttcacgaaacatctttccaaaccgagatgggacaattgcttgacttgataactgctccagaagacaaagtcgatttgtctaagttctccctggaacgtcatagactaatcgttgtgtataagacagctttttactcgttttatctaccagttgcattggctatgtacttatgtggtatttctcaccaagctgcacaggacccttatgctttggccagttccattttaatcccattaggtgagtacttccaagttcaagatgactacttggattttgctggcactccagaacaaattggtaagataggtactgatattgtcgataataaatgttcatggtgcgttaacaccgccttggctcttgctgcccccgcccagagagctgtcctggacgcttcttacggtcgtaaggacgccgctgccgaagctagagttaagaaggtcttcgaagaagtaggtttgcacgctaaatacgctgcctatgaagaagatgcataccgtagaatcgttggcttgattgctaccatcccagaggctggtcttggtgccgacggtgaagtgaagttgcaaagagctgtctttaagagtttcttggataaaatctataaaaggcaaaagtaa

SEQ ID NO: 512 - DNA, 1050 bp, Artificial Sequence
  Synthetic
atgtccgacaatcgtacgaagtttttaaacgttttcccatcattggtaaaagagctaagagatattttggctggctacggaatgcccgaagaagccatacagtggtatgaaaagtcgctgaactacaattctgtcggtggtaagttgaacaggggtcttagcgtggttgacacatatgctttattgaaaggttacaagtctgtcgatgaattgtccgacgaagaatacaagaaagttgccatcttgggttggtgtattgaattgttacaagcatatttcctagttgctgatgacatgatggataagtctatcaccagaagaggtcaaccatgctggtacaaagttcctaacgtcggcgaaattgccatctgggatgcttttatgcttgagggtgctatttattgtttgttaaagaaccacttcagacaagagccatactacgtcgacatcctggaattgtttcatgatgtaactttccaaactgaattgggacaacttttggacttaataaccgctccagaagataaggtcgatttgtctaagttttccttagaaaagcactcattcatcgttattttcaaaactgcttattactctttttatctacctgttgcacttgctttgtacgccgctggtattaccgatccaagagacttgaagcaggctagagatgttctgattcctttgggtgagtacttccaaatccaagacgactacttggattgtttcggtaagccagaagacattggtaaaataggtactgatatccaagacaataagtgttcctgggtgataaatattgccctgaaaaaggctagtccagaacaacgtaaggtcttggatgaaaactacggtagaaaggacgctgaaaaggaacagaaatgcagagcagtttttaacgaattagatatcgaatctatttatcatgaatatgaggaaaaggtagcctcagaattgagagctaaaattgctaatatcgatgagagcagaggtttcaaagctgaagttttaacgttatttctaaataagatttaccaccgtaagaagtaa

SEQ ID NO: 513 - DNA, 1077 bp, Artificial Sequence
  Synthetic
atgcctgtcacaattcccttgaagacttcaccagaagttatcgccgcttttgagaaaagctaccatgttatagctgaagatcttctacacgacttggaacacaagtataagatgccagcagtaggtgtgcagagaatgcgtcaaatgctggaacataatgttatgggaggtaaaatgaacagaggtttggctgtcgtggacaccttaatgattatcgcacaagctcaaggtaagacgttaactgaagatgatattttcagggctcacgttgccggctgggctatcgagtggttgcaagcctgcttcttggtcgctgacgatatcatggaccaatcccacaccagaagaggtaaaccatgttggtacaggatgccaggtgttggtttggaagctgtctgggacgctctagttttggaaggtcatatttttatgttcataaagaagcacttcagatctcaaccttactatgccgatttagttgacttactacacgaagtagcttacttgactgagttgggacaaatgattgatatgctgaccgcaccagaaggtgatgtcaacttgtcgagattttctttggaccgtcatgcctatattgttgtccataagacttcttactactccttttatctaagtgttgctatggctttcatgctttctggtatcaccaatccagctgctttcgaccaggctaaacaaattttgctgcctttgggtgaatactttcaagtacaggatgattatcttgatgccttcgccgacccctctgtcttaggtaagatcggcaccgacatagaagacaacaagtgtagttggttggttaatacagctctagcaagatgtactccagaacaaagaactttgttagatactaactacggtagaaaggatgccaaatgtatcgaagctgtgaagcaactttacagagatatgcaactagaccaagaatttgaaaggtacgaagaggcatcctacaagagaattatgggtatgatcaacggtatcgataagggattgggtgttccacctgaagtttacgtttcattcatgaacaagatttataaaagaagcaaataa

SEQ ID NO: 514 - DNA, 1044 bp, Artificial Sequence
  Synthetic
atggccaagtccgcaagcttggagaaatttgaatcaatattcccaactctagttgaagacgtcctggctcactctaagagttacggtttgcctcagcaagctttagattggttcaaaaacaatttgaacgctaatgccattggcggaaagtgcaacaggggtatgtccgtgccagactcagtttctcttatgacaggtaaggaattgaacgaagaggaatattttaaggctgctaccttaggttggttaactgaattgttgcaagcatacttccttgtatcggatgatatcatggactcttcgattaccagacgtggtgttccctgttggtacagacaaccagaagttggtatgatcgctatttgggatgcctttatgttggaatctgctatatatatcttattgaaaaagtacttcagatcccataaatcctatgtcgacttgatggaactgttccacgaagtcacgttccaaactgaattaggccaaacctgtgatttgctaaccgctccagaggataaggttgacttggacaatttctctatggaaaagtacacttttattgtgatctacaagacagcctactatagtttttacctacccgtcgctttggcactgcatcaattgggtattgctactgaaaagaacttgaaacaggctgaagctgttttgatcccacttggtacatatttccaaatacaagacgattacttagacaatttcggtgatcctgaacacattggtaaaatcggaactgatattttggataacaagtgttcttggttggtcaacaaggccctaagcatagctacgccagaacaaagaaaggttttagaggagaactatggtagaaagaataaagacaacgaagctgtcgtaaagaaactgtacaatgaattgggtcttgaaaagttgtaccaagaatacgaggaaaaggaagttggtaacattcgtaagctgatcgatgaaaccgacgaatcagagggtcttaaaaagactgtttttgaatcttttttaggcaaaatttataagagaacgaaataa

SEQ ID NO: 515 - DNA, 1044 bp, Artificial Sequence
  Synthetic
atggccaaggctgatgctttacaaaaatacgagtcgattttccctacattggtagaagacgtgctagcacactcaaagtcttatggccttccacagcaagctctggactggtttaaaaacaatttgaacgccaacgctataggtggtaagtgcaatagaggaatgagcgttcccgatagtgtctctttaatgaccggtaaggaattgaatgaagaagagtacttcaaagctgccactttgggttggttgactgaactgttgcaagcttactggcttgtctccgatgacatcatggactcctccatcaccaggagaggtgttccatgttggtatcgtcaaccagaagttggtatgattgctattaacgatgcttttatgttagaatctgcaatctatattttgctaaagaagtacttcagatcgcataagtcttacgtcgatttgatggaattatttcacgaagttacgttccaaactgaattgggtcaaacctgtgacctattgactgctcctgagacaaaggttgacttggataacttttccatggaaaaatacaccttcatcgtaatttacaaaactgcctattattcattctacttaccagtcgctttggccctacatcagttgggcatagccaccgaaaagaatctgaagcaagctgaagctatcttgattccacttggtacttacttccaaatacaagatgactatttagacaactttggtgatccagaacacatcggtaagattggtacggatatcttggacaacaagtgtagctggttagttaataaagcattgttgattgctacaccagaacaaagaaaaattttagatgaaaactacggacgtaagaacaaggataatgaggctgtggtcaaaaagctatataacgagctaggtttggaaaagttgtaccaagaatacgaagaatctgaggttggtaagattagaaaattgatcgatgaaactgacgaatctgaaggtcttaaaaagagtgttttcgagtcctttctgggtaagatttacaaaagaaccaagtaa

SEQ ID NO: 516 - DNA, 1044 bp, Artificial Sequence
  Synthetic
atggccactacaaccccaagggctgacttcgagaaagtctttccctcattggtagaagatctattaggtgaagcacgtaagtataagctgccagacaatgctcttcaatggttcgaaagatcgttgaacgctaacacgcctggcggtaaattgaacagaggtatgtccgttccagataccggtagccagttattggaaagaccattgtctcctgacgaatttaaggatttagccactttgggatggctgactgaattgttgcaagctttctttcttgtttctgacgatataatggatgcttctattaccagaagaggtgagccatgttggtacagacaagaaggtgtgggtatgatcgccatttgggacgcattcatgctagaatccggaatttacttgactttaaagaagcattttaggagtcacccagcttacttggatctaatcgaattgttccacgaagttacctggcaaactgaattaggtcaactatgcgacttaataactgctccagaggatcatgtcgatttgaatagcttctccatggacaaatatacatttatcgtcatttacaagaccgcatattactctttctacttgccagttgctttggctttacactacttgcgtttagccaccccccagaatttgaagcaagctcatgacatccttattccattgggtgaatattttcaaatccaagatgattacttagacgcattcggagatccttctgttattggtaaaatcggtacggatattaaggacaacaagtgtggctggttgattaaccaagctctacagatatgtactcccgaacaaagaaaggtattggatgaaaactacggtcaaaaggatgacgctaaggaagccaaagtcaaggagttgtacgatgaactgcaacttgaaaagagatatagagcctacgaagagaaaagagttggtgaaatccgtcaacttatagctgctgttgacgaatcaactggtttgaagaagggtgtgtttgaagttttcctggctaaaatttataagagatctaaataa

SEQ ID NO: 517 - DNA, 1065 bp, Artificial Sequence
  Synthetic
atgtcaaaggaggtagctgccaaaaacaaggtcaagttcttggcatttttcccagacttagtttttgaactggaagttatgcttgaaaattacggtatgcctgctgatgctataaactggttcaaaagatccttgaattataacacgccaggcggtaagctaaaccgtggtatttctgttgtcgacacatacgtgatcttaaaaggttataagtcttgggatgaattgtcggccgaagaatttaagaaggctgctattttgggatggtgtgtcgagttgctacaggcttacttcttggttgctgacgatatgatggaccaaagcatcaccagaagaggtcaaccctgctggtacaaggttgaaaatgtcggtaacattgccatctgggatagttttatgttagaaggtgctatctataaaattttgaggaaatacttcaagaaggagtcctactatgcagatttacttgatttgttgcacgaagtaactttccaaactgaattaggacaactattagacttgatcaccgctcctgaagaccatgttgatttgtctaagttcactccagccaagcactcttttattgtgatctttaaaaccgcttactacagtttctatcttccagttgtcatggctatgtacctgtccggcattacccatgaaaaggacttgcaacaggccgagcacattttaatcccattgggtgaatactttcaaatacaagacgattatttggactgtttcggtaagcccgaagatattggtaaaataggtactgatatccaagacaataagtgttcttgggttattaaccaagccttgagactagctagcccagaacaaagacagattttggatgaaaactacggtagaaaagatgcagataaggaagctaaatgtaaggaagtcttcgaccaattggacattgctggtaaatataaggcttatgaggaaaacattggtaaggaactgcaaaaaagaatagccgacaccgaggaagatcgtggtttcaagaaggaagtttttcaagttttcttcgacaaaatctacaagagaactaagtaa

SEQ ID NO: 518 - DNA, 1056 bp, Artificial Sequence
  Synthetic
atgtcaaaagaggaaaagagggaaaagttcttgagtgtgtttccaaagctagttgaagaattaaaatccatattggtaggttatggcatgcgtggtgacgcagttcaatggttcgaaaattcgcttaactacaacacccctggtggaaagttgaatagaggtctgtctgtcgtcgatacttacgccattttgacaggtaagggctcctttaaggatttaagcgacgacgagtatttcaaattggctacgttaggttggtgtatcgaattgctacaggcttacttcctggttgctgatgacatgatggataagtctattaccagaagaggtcaaccatgctggtacagaatcgaaaacgtcggtgaaatagccatctgggatgcttttatgttggaggctgcaatttattgtttgcttaagaaccactttaaaaaggaatcttactacgttgacttaatcgaattgttccatgatgttactttccaaactgaactaggtcaattgttggacctgattaccgctcccgaagacaacgttgatttatctaagttttccttggaaaaacactcttttattgtcagattcaaaactgcctattactccttctaccttccagttgctttggccatgtacgtcgctggaattacagacgctaaggatttgaagcaagctcaagatgtattaatcccattgggtgagtatttccagatccaagacgattacctagattgtttcggtaaaccagaagacataggtaagattggtaccgatatccaagacaataagtgttcctgggtggtgaacactgctttgaagatttgcacacctgaacaacgtactttgcttgatgaaaactatggaaaaaaggacgctgaatcagaaaagaagtgtaagcaacttttttatgatctgaagatcaatgacatgtaccatgagtacgaagagggtattgccaaagaattaaaggaaaagatcgcaaacgttgacgaatcgagaggtttcaaaggcgacgtcctaactgcttttttggaaaaggtttacaagagaaaaaagtaa

SEQ ID NO: 519 - DNA, 1053 bp, Artificial Sequence
  Synthetic
atgactaccacatccaagcaacaggagatcgatgaatttataaaaatttgctacgaactaaaggaagaagtgttaactaccatgaagacgaaatatactatgccacaagaagctattgactgggttaatgaaatgatcgattacaactgtattggaggtaagctgaacagaggtatatcagtaatccactgtgcagaagctcttacccaaggtaagggcttgactcctgaggcccgtaaaaaagctgccattttgggttggtgtattgaatggttgcaagctttcttcttggtcgccgacgatgttatggacgactctatcacaaggagaggtcaaccctgttggtatagaatcccaaaggtcaagcaaatagctatttgggatgcttttttattggaatcgttcgtttaccaaatcttgaagacgcatttcagaggtgaaagttactacttagatttggtcgaaacttttcaggaggtcatcttccaaaccgaactaggtcaattgttggaccttacttcccaaccattagacggcccaacgaatttagatagattcacaattgagcgtcaccaaaagattgtggtttttaaaaccgcttattatactttttacttgagcgccgcttctgcaatgttcctgtcgggtgtttctgatcctgcttgttacactctggcccaagaaatatgcgttaagattggtgaatactttcaggttcaagacgattatttggactgttacgctgatccagaagtcttgggtaaaatcggtactgatattcaagataacaagtgttcttggttagttgtacaagccctggctagagctaccccagaacagagagccgttattaaggaacactacggtaagaataacgaagcttccatcgctgtaatcaaggcattgtacgtcagcttagatttggagggagtttatagaaagtatgaaaacgaatcttatgacgagctatgcaagcttattggtgccgtcaacaacatgcccgctaccgttttccatatgttattgagtaaaatatacaaacgtacgatgtaa

SEQ ID NO: 520 - DNA, 1044 bp, Artificial Sequence
  Synthetic
atggctcagaaaacgactctaaaggagtttgaagccgtttacccaaagcttgaagaagctttattggatcatgcaaaatcctataagttgcccgaaaaggaactggagtggttgaagaagaacttggaagtcaatccattaggcggtaaatgcaaccgtggaatgtcagtgcctgactcggctagtgttatattgggtaggcctttaaccgaagacgaatacttcaagacagccactttgggttggatgactgaattattgcaagctttctttctagtctctgatgacatcatggattcttccattaccagaagaggtcaaccatgttggtatagacaagaaggtgttggtatgattgctatctgggacgccttcatcttggaaagcggtatttacattatcttaaaaaagttctttcgtgatcacccaagatacatagagttggtagaattattccacgagacttctttccaaaccgaactgggtcaattgtgtgacctattgacagctccagaagattctgttaatttggacaacttttccctggaaaagtacagtttcatcgtcatttataaaaccgctttttactcattctacttgccagtcgccctagcactgtactatttggatattgctactcctaagaacttacaaacggctaaagatattttgattccattgggtgaatatttccagatccaagacgactatcttgataattttggtttgccagaacatatcggcaagattggcactgacatcaaggataacaagtgttcttggttggttaaccaagcacttaaaatcgtcagtccagagcaaagaaaaattcttgaagacaactacggacagaaggatgatgccaaggaaaaagttataaagcaattgtacgatgacttaaagttaaaggaactttacgaggaatttgaagaaaagagagctggtgaattgaaagatatgattaataagatcgacgaatccgagggtttgaaaaagcaagtattcgaagttttcttaggtaagatctacaagagatctaagtaa

SEQ ID NO: 521 - DNA, 1053 bp, Artificial Sequence
  Synthetic
atggacaagcaagccgcaaaagataagtttatcggtgaatttgatgctctagtcgacgagttaaaacagatacttcatcactataagatgccacaagaagctgttgattggttcaccaaaaacttgtactacaatgctcccggcggtaagttgaaccgtggactgtcggtaattgacacatactgcatcttaaagaatgtgaagattgaagaattgtcagatgccgagtataagaaagttgctatcttgggttgggctattgaattgctgcaagcttacttcttggttgcagatgacatgatggatcaaagcaagactaggagaggtcaaccttgttggtatttaaagccaggtgtcggtaacatagccatttgggactctttcatgttagaaggtgctatttacgttttgttgaaaaagcacttcagacaagacccatactatgtggatttgttggacctatttcatgaagtcacgttccagactgaattgggccaacttttagatttggttaccgctgacgaagagcacgtcgatttggataaattttccctgcaaaagcattctttcatcgttatttttaaaactgcttactactccttctacctaccagtcgccttggcaatgtttatgtccggtgtaagttctcaaaaggacttggaacaagttaagaacgtcttgatccctttaggagaatacttccagattcaagatgactacttggattgttttggtaccccagaacaaatcggtaagatcggtactgacatcaaagataataagtgttcttgggttgtcaaccaagctctattgaaggttaatgctgagcagagaaaactgttagacgaaaactatggtaagaaggatgatgaaagtgaagccagagttaagaagcttttccacgacttagacattccaaaaatctacaatgaatacgaagaggacgttgtctctcgtttgagagctcaaattgaaaacatcgatgaatcaagaggtttgaagaaggaagtcctgaccagtttccttaacaaagtttataagagatccaagtaa

SEQ ID NO: 522 - DNA, 1044 bp, Artificial Sequence
  Synthetic
atgggaaagacaaccttaaaagagttcgaagcagtttttcccttgcttgtggacgaactaatgggcgtcctggaacaatacaagatcccagccgaagctgctgcttggtataggcgtaatttggaacagaacacgttgggtggtaaatgcaacagaggtatgtccgttgtcgatacttactctatattgactggtcaagacaagttatcagataccgagtatttaagaactgctattttgggttggtgtaccgaactattgcaagccttctttttagttgctgatgacatcatggatagctcgaagactcgtagaggttccccatgttggtacttgttcgacggtgtaggaaatattgctatttgggattcttttatgcttgaatctgctgttttcatattgattaagaagcatttcagaaaagaatcttactatatcgatttggtcgaattgttccaagagacaatctttcaaaccgaactaggtcagttactagacttaattactgcccctgaagatagagttgacttgagtaaattttcccttgccaagcacagtttcatcgtcattttcaagactgcttactatagcttttacttgccagtagctttggcaatgtacatggctggtattgctactgaatctaacttgaagcaagcaagagatgttttaatcccattgggtgaatacttccaaatccaagacgattatttggactgttacggtgatcctgaacacatcggcaagattggtaccgacataaaggataataaatgtggttggctgatcaacaaggccttagctattgccacaccagaacaaagagatatcttggacaaaaactacggtagaaaggacgatgaggctgaagctagaattaagcaagtttacatcgagttggaactggaaaagtgctaccaagaatatgaggaacaagcagtcggcaaaattcgtggtcttattgatcaagtcgacgaatcaaatggtttgaaaaaagaagttcttacctccttcttgaacaagatttataagcgtagcaaataa

SEQ ID NO: 523 - DNA, 1056 bp, Artificial Sequence
  Synthetic
atgtccaaagaaggtaaccgtgagaagtttcttgaagaatttccagaattagttcacgaactgaagaccattctacagaattatggaatgcctcaagacgctatccaatggtacgagtcatctttgttcttcaacacaccaggtggtaagttgaacaggggtttgtcggtcgtagatacttacgttatattgaaaggctataagtctttctccgatatggccaaggaagaatacaaaaaggtcgctattttaggttggtgcatcgaattattgcaagcatacttcctggttgctgacgatatgatggacaagtctattactagaagaggtcaaccctgttggtatagagtgaagggagtcggtgaaattgccatctgggatgcttttatgttggaagctgctatatacatcttgctaaaaaatcattttcgtagcgagagttactacgttgacctaattgaattgttccacgatgttaccttccaaactgaattgggtcaattattggacctgattaccgccccagaagataaagttgaccttaataagttttctatgaacaagcagtccttcatagttagattcaagacggcatattactcgttctatttgccagtcgctttagctatgtacatggcaggtatcaactctgacactgatttgcaacaagctcaagatgtgttgatccctttgggtgagtactttcaaattcaagacgacttcttggattgttttggtaccccagaacagatcggtaagattggcacggatatacaagataacaagtgttcctgggtcattaataaggccctggaattggtcaccccagaacaaagaaaagttcttgatgaaaactatggtcaaaagaaccaggaatgcgaagacaaatgtagagaagtattcaattcattaaatctaccaaagtactatgaacaatacgaagaaaacatcgctaaggagttaagagagaagatctctcaaattgatgagtccagaggtttcaaaggagaagttctgactgtctttcttaacaagatttacaaaaggacaaagtaa

SEQ ID NO: 524 - DNA, 1056 bp, Artificial Sequence
  Synthetic
atgtcgaaggctgagtctaaaagcaagttcctggcagtttttcctaagatagtcaacgaattacagagtattctaaaatcatataatatgtcccaagaagccatcgactggttcaccaacaaccttaattacaacactccaggtggcaagttgaataggggattgagcgtggttgatacatacgtcattttaaaaaactatacttctatcaatgacttgtccaccgaagaatacgaaaaggtagctattttgggttggtgtatcgagttgctacaagcttactttttggttgccgatgatatgatggactcttccatcacgagaagaggtcaaccatgctggtatcgtgtcgaaaacgttaaccaaattgctatttgggattctttcatgttagaagcttctatctacgttttgttgaagaatcatttcagaaatgacccctactatgttgacttgatcgaactattccacgatattacttttaaaaccgaattaggtcaattgcttgatttgatcaccgcaccagaagataacgtcaacctatccaatttctcactggacaagcactcttttatagtaatttacaagacagcttactatagtttctacttgccagtagccttagctatgtatatggcaaacgtcagtaacgaaattgacttgaagcaagcccatgatatacttattccactaggtgagtactttcagatacaagatgacttccttgattgttttggtaagcctgaagatatcggtaagattggaactgacattcaagacaacaaatgttcctggatcatcaataccgctttaactttggccgacaaggaacaaaagcaattgttggacaacaactatggtcagaaagatgctgctaaagagaaaatttgcaaagatattttccaaaatttgaagattgaccaaatctaccacgattatgaagaaaagatcgtcaacgaacttaagcaaaagatttctaaggttgatcagtcgagaggttttaagtctgaagttttaagcgttttcctgaacaagatatacaagagaaaaaagtaa

SEQ ID NO: 525 - DNA, 1056 bp, Artificial Sequence
  Synthetic
atgacgaaagaggataatcgtaagaagtttttggaccaattcccttccctagtagcccagttaacagaagctttgaaaacttacggtattccccaagatgcaatcgactggtatgaaaagtctctgatgtacaacaccccaggaggtaagttgaacaggggtttaagcgtggttgacacctatgtcatattgaagggccttaacagtccattcgatatgccagatgaagaatactcaaaagttgctttgctaggttggtgtgtcgagttgttacaagcttactttcttgttgccgacgatatgatggacaagtctattactagaagaggtcaaccatgctggtatagaatcgatgaagttggtgacatggctatttgggatgctttcatgttggaagcagctatctactgtttgttaaagagaaatttcagaaacgaatcttactatgtcgatttgttggaattgcttcacgacgttacttttcaaacagaagttggtcaattattagatttgatgactgcccctgagatgctgattgatctatccaaattcagtttggaaagacattcgtacattgtcatctttaagaccgcttactattctttctacttgccagtggctctggcaatgcacatatcaggcgttaacgacgaacgtgatttgcagcaagctaaggacgtccttctaccattgggtgaatacttccaaattcaggacgactatttagactgttttggtaagcctgaggatatcggtaaaataggtaccgacatccaagataataaatgctcctgggtaattaacgccgctttgaagttgtgttctccagaacaaagaaaaatcttggatgataactacggaagaaagagtgacatttgtgaacaaaagtgtaagcaagttttcgccgatctaaatctggaaaaagtttatgaaaattacgaagaacaagtcgcagctaagttaagagacagaattgagatgactgatgaatctaggggttttaagagagaagtgctatatagctttttggataagatatacaaaagaaagaaataa

SEQ ID NO: 526 - DNA, 1053 bp, Artificial Sequence
  Synthetic
atggataagcaagcagctaaagaccgttttatcaaggagttcgatcagttagtcaaggaattgcaagaaatactaactaactacaaaatgcctcaagaagccattgactggttcacaaagtcactggactataataccccaggcggtaagcttaacagaggattgtccgtgatcgatacctacgctattttgaagggtactacgtctgataaattaggtgacgaagaatataagaaagctgctttgttgggttggtgcattgaattgctacaagcctactttttagttgctgacgatatgatggatgctagtaagacaaggagaggtcaaccctgttggtacttagttgaaggtgtcggaaacatcgcaatttgggactctttcatgttggagggtgctatatatatcttgctgaagaaacatttcagacaagacaagtactatgttgatcttttggatttgtttcacgaagtaactttccaaaccgaattgggtcagctattggatttagtcactgccgatgaagaacacgttgaccttgacaagtttagcttggagaagcattccttcattgttaccttcaaaactgcttactactctttttacttgccagtagctttatcgatgttcatggtcggcgtttcatctgaagaggacctgaaacaagcaagagatattcttatcccactgggtgaatattttcaaatacaagacgatttcctagattgtttcggtactccagaacaaatcggtaagatcggtaccgatattaaggacaataagtgttcctgggtggtcaataaggccttgaacaaagttaaccaagctcaacgtaaattattggatgaaaactacggtaagaaggacgatgaatctgaacagagagttaaagacttgttcaaggaattggaaattgaaaaggactattaccagtatgaagagtccatcgtatcggagctgaagcaaaaaattgaccaagttgatgaaagtagaggtttcaaaaaggaagtcttgaccagctttttgggtaaggtttacaagagaagcaaataa

SEQ ID NO: 527 - DNA, 1065 bp, Artificial Sequence
  Synthetic
atggtcgcagccactaattctttgtcaaaagaagacaagagggctaagtttgaggctgttttccccattctggtggatgaaatagtagattacttaacgtcggttaacgtcccacaagacgctaaggattggttcaaaaagagcctttatcacaacaccctaggcggtaagtacaatagaggattgtccgttatcgacacatatgaaattttgtctggtaaagccttggatgacaactcctactttagagctgctttattgggttggtgcatcgaattattgcaggccttctttctagttgctgatgacatgatggatgaaagtaagactcgtagaggtcaaccttgttggtacttgatgccaaatgttggttctattgctatctgggattctttcatgttagaatccgccatctatttcttgcttaaaaagcattttagacacgaaacttactacgtcgacttgttggacttgttccatgaggtcaccttccaaaccactctaggtcaagaattagacttgttgaccgcaccagagaaccacgtcgatttaagcaagttctctcaagataagcatgcttttattgttatttttaagactgcttactacagcttctatctgccagttgccttggctatgtgtatggcaaacgtagccacaccagacaatttacaaagagcttcagatgtcctaatacctttgggtaaatattttcagattcaagatgactacttggattgttacggtgacccatcggttaccggcaaggtgggtactgatatccttgacaacaagtgttcctggttgattaatgttgctctggctaaggcttcacctgaacaacgtaaagttttggatgaaaactatggtagaaaagacgcagactgcgaaaagagggttaaggccgtcttcgaagagttaaacttaaagaaagcttatgaagaatacgaagaatctgaagtttctactattaaacaaagaatctctgtcctagatgagtccgctggattgaagaaggaagcattcacaacttttttgaataagatatacaagagaagtaagtaa

SEQ ID NO: 528 - DNA, 1053 bp, Artificial Sequence
  Synthetic
atggataaagcagctatacgtaagaagttcaccgacgagtttgacggtttagtcgatgaattgaaggaaatgcttgtattgtacaacatgccagccgaagctattgaatggttccaaaagaatctggactataacacgcctggcggtaaactaaataggggattgtccgttatcgatacatactgcattttaaagggtaaaaagctggaagacttgtcggctgccgaatataaaaaggttgctatcttgggttggtgtattgagttgctacaggcttactttttggtggctgatgacatgatggatcaatcaaagactagaagaggtcaaccatgttggtacttagttgaaggtgtcggtaacatagcaatctgggatagtttcatgcttgaaggtgctatctatatgttgttaaagaagcacttcagacaagactcttactacgtcgatttgcttgacttgtttcatgaggttacctttcaaactgaattgggtcaactattagatttggtgaccgccgacgaggaacacgtagatttggacaaattctccttagctaagcattctttcattgttattttcaaaactgcctactatagcttctacttaccagttgctttagctatgtttatgtgtggcattaactctgatgccgacttgaaacaggtcagagatgttttgatccccttgggtgaatactttcaaatccaagatgatttcttggactgtttcggtactccagaacaaatcggaaagattggaacagacatcaaggacaataagtgttcttgggtcgtgaaccaggcattgttaaaggctacccctgaacaaagaaaggttttggatgaaaattatggtaaaaaggatgacgaatccgaacaaagagttaaagacttgtttaacgagatgaagattgccgacatttataatgaatacgaagaagctataggtgctaagctaaaggaacaaatagataaagtcgatgaatctaggggtttaaaaaaggaagttctgaccgccttcttggctaaagtctacaagcgttcgaagtaa

SEQ ID NO: 529 - DNA, 1053 bp, Artificial Sequence
  Synthetic
atggacaaggccgcagctaaagaaaggttcatcaatgagtttgatcagttggttgaagaattaaaggctatattgattggatacaagatgcctcaagatgctatcgactggttcgtcggtaacctaaactataacaccccaggtggtaaactgaatcgtggcctttctgtaattgatacttactgtattttaaacaacacaacggccaatgacttgtcatccgaagagtattctaaggttgctttgttgggttggtgcatcgaattgttacaagcttactttctagtcgcagacgatatgatggaccactcgaagaccagaagaggtcaaccctgttggtacttgaacgaaggtgttggtaatatagctatttgggatagcttcatgttggaaggagccctatatatccttttgaaaaagcatttcagaaacgaaaagtactacgttgatttattggacctatttcacgaggtgactttccaaactgaacttggtcaattgattgatttaattaccgctgacgaagaaatcgtcgacttggataaattttctctttccaagcatagtttcatagttatttataaaacagcttattactctttctacttaccagtggccttggctatgtttatgtctggcatcaattccgaacaagatttgaagcaagtaagagatatcttgattccactgggtgagtatttccaaatccaggatgactttttggattgtttcggtactccagaacaaattggtaagattggtaccgacataaaggataacaagtgctcttgggtcgttaaccaagcattacttcacgctaatgaagaacaaagaaaattgttggacgaaaattacggaaagaaggacgatgaatcggaaaaacgttgtaagcaactattcaaggacctgaacattgaaaagatctactttgattacgaagaagacactggtgccaaattgagaaaacaaattgagcagatcgacgaatcaagaggattgaagaaagaggttttaacatccttcttaaacaaggtctacaaacgttccaagtaa

SEQ ID NO: 530 - protein, 709 aa, Artificial Sequence
  Synthetic
MASEKEIRRERFLNVFPKLVEELNASLLAYGMPKEACDWYAHSLNYNTPGGKLNRGLSVVDTYAILSNKTVEQLGQEEYEKVAILGWCIELLQAYFLVADDMMDKSITRRGQPCWYKVPEVGEIAINDAFMLEAAIYKLLKSHFRNEKYYIDITELFHEVTFQTELGQLMDLITAPEDKVDLSKFSLKKHSFIVTFKTAYYSFYLPVALAMYVAGITDEKDLKQARDVLIPLGEYFQIQDDYLDCFGTPEQIGKIGTDIQDNKCSWVINKALELASAEQRKTLDENYGKKDSVAEAKCKKIFNDLKIEQLYHEYEESIAKDLKAKISQVDESRGFKADVLTAFLNKVYKRSKGGGGSGGGGSGGGGSGGGGSGGGGSGGGGSGGGGSSAGSDQIEGSPHHESDNSIATKILNFGHTCWKLQRPYVVKGMISIACGLFGRELFHNTNLLSWSLMLKAFSSLMVILSFNFFAAIMNQIYDVDIDRINKPDLPLVSGEMSIETAWILSIIVALTGLILTIKLNCGPLFISLYCVSIFAGFAYSVPPIRWKQYPFTNFLITISSHVGVNFTCYYASRAAFGLPFEMSPPFTFILAFMTVMGMTIAFAKDISDIEGDAKYGVSTVATKLGARNMTFVVSGVLLLTYVSAILAAIIWPQAFKSNVMLLSHAILAFCLIFQTRELALANYASAPSRQFFEFIWKLHYAEYLVYVFI

SEQ ID NO: 531 - protein, 709 aa, Artificial Sequence; identical to SEQ ID NO: 171
  Synthetic

SEQ ID NO: 532 - protein, 703 aa, Artificial Sequence
  Synthetic
MPATDRAAFQEIFPSLAEDILAYAKESNLPQNALQWFEKALNVNVPGGKLNRGLSCPDTGLALLEKPLTEEQFKHLSILGWLTELLQAFFLVSDDIMDGSITRRGQPCWYRHEGVGLIAIWDAFLLESSIYIILKKHFRSHPAYADFIDLFHETTWQTELGQLCDLITAPEDKVDLNNFSMEKYMFIVTYKTAYYSFYLPVALALLYLQRATPSNLRQAHDILIPLGQYFQVQDDYLDAYGNPDVIGKIGTDIKDNKCSWLVNQALQRCNAEQRKVLDEAYGRKDDALEAKVKALYKELDLEKVYQEYEEKIVGELKEKIAAVDESEGLKKDVFNAFLGKIYKRSKGGGGSGGGGSGGGGSGGGGSGGGGSGGGGSGGGGSSAGSDQIEGSPHHESDNSIATKILNFGHTCWKLQRPYVVKGMISIACGLFGRELFHNTNLLSWSLMLKAFSSLMVILSFNFFAAIMNQIYDVDIDRINKPDLPLVSGEMSIETAWILSIIVALTGLILTIKLNCGPLFISLYCVSIFAGFAYSVPPIRWKQYPFTNFLITISSHVGVNFTCYYASRAAFGLPFEMSPPFTFILAFMTVMGMTIAFAKDISDIEGDAKYGVSTVATKLGARNMTFVVSGVLLLTYVSAILAAIIWPQAFKSNVMLLSHAILAFCLIFQTRELALANYASAPSRQFFEFIWKLHYAEYLVYVFI

SEQ ID NO: 533 - protein, 759 aa, Artificial Sequence
  Synthetic
MSDKAARRARFEGAWNEIRDEILAYFQGEHMPPEAVEWYKNNLDYNVPGGKLNRGMSVCDTVQILKGRELTDEEYKRAAVLGWCVELLQGFWLVSDDIMDASITRRGQPCWYRVPKVGMLAINDSFMLEAPIYWLIKKYFRRESFYADLVDLFHETTYQTEMGQLVDLITAPEDVVDLSKFSLERHRLIVVYKTAYYSFYLPVACAMMICGIPFPEKEPRFDFLNGGFGGAPLDPTADPYTTALSILIPLGEYFQVQDDYLDYSAPPEVLGKIGTDIIDNKCSWVVNAALVLTAPAHSPSASASTPFAPTASGSLATSNLSEERKAELRKILDDNYGKKSKENEEKVKEVYRELDIAAHYKRYEEGVVGEVRRRIASVDEAKTGLKRDVFTSFLEKIYGRSKGGGGSGGGGSGGGGSGGGGSGGGGSGGGGSGGGGSSAGSDQIEGSPHHESDNSIATKILNFGHTCWKLQRPYVVKGMISIACGLFGRELFHNTNLLSWSLMLKAFSSLMVILSFNFFAAIMNQIYDVDIDRINKPDLPLVSGEMSIETAWILSIIVALTGLILTIKLNCGPLFISLYCVSIFAGFAYSVPPIRWKQYPFTNFLITISSHVGVNFTCYYASRAAFGLPFEMSPPFTFILAFMTVMGMTIAFAKDISDIEGDAKYGVSTVATKLGARNMTFVVSGVLLLTYVSAILAAIIWPQAFKSNVMLLSHAILAFCLIFQTRELALANYASAPSRQFFEFIWKLHYAEYLVYVFI

SEQ ID NO: 534 - protein, 704 aa, Artificial Sequence
  Synthetic
MGKTTLKEFEAVFPLLVDEIMAVLEGYKISSEAAAWYRKVLEHNTVGGKCNRGMSVVDTYSTLTNQDKLSDEDYLRSAILGWCTELLQAFWLVSDDIMDGSKTRRGSPCWYLHEGVGNIAINDAFMLESAIYILLKKHFRNTPYYIDLIELFHDVSFQTELGQLLDLITAPEDRVDLSKFSLEKHSFIVIFKTAYYSFYLPVALAMYMAGVATPENLKQAHDVLIPLGEYFQIQDDYLDCYGDPEHIGKIGTDIKDNKCGWLINQALAIATPEQRQVLDDNYGKKDDVAEARVKKVFLDLELEKRYQDYEETVVGKIRTLIEGIDETTGFKKDVLTNFLNKIYKRSKGGGGSGGGGSGGGGSGGGGSGGGGSGGGGSGGGGSSAGSDQIEGSPHHESDNSIATKILNFGHTCWKLQRPYVVKGMISIACGLFGRELFHNTNLLSWSLMLKAFSSLMVILSFNFFAAIMNQIYDVDIDRINKPDLPLVSGEMSIETAWILSIIVALTGLILTIKLNCGPLFISLYCVSIFAGFAYSVPPIRWKQYPFTNFLITISSHVGVNFTCYYASRAAFGLPFEMSPPFTFILAFMTVMGMTIAFAKDISDIEGDAKYGVSTVATKLGARNMTFVVSGVLLLTYVSAILAAIIWPQAFKSNVMLLSHAILAFCLIFQTRELALANYASAPSRQFFEFIWKLHYAEYLVYVFI

SEQ ID NO: 535 - protein, 709 aa, Artificial Sequence
  Synthetic
MVAVKLQKEENRQAFLKVFPTLADEVLAELRKYNMPEDAYEWTKKMLYYNVPGGKLNRGISVVDTVRILKGDSVTEDDIFKATVLGWLIEFLQAFFLVSDDIMDASITRRGQPCWYKSEGVGMVAIWDAFILESCIYIFLKKYFKKTNYYIELVELFHEVTFQTELGQLCDLITAPEDHVDLSKFSIKKHQFIVIYKTAYYSFYLPVALAMHMVGVKNEEAFKQAHDILIPLGEYFQVQDDYLDCYGAPEVIGKIGTDIMDNKCSWLINQALAKASPEQRKTLDENYGKKNADSEAKVKQIYIDLDIEGTYKAYEEKSFNDLNALIDQLDESAGLKKMVFTEFMDKIYKRTKGGGGSGGGGSGGGGSGGGGSGGGGSGGGGSGGGGSSAGSDQIEGSPHHESDNSIATKILNFGHTCWKLQRPYVVKGMISIACGLFGRELFHNTNLLSWSLMLKAFSSLMVILSFNFFAAIMNQIYDVDIDRINKPDLPLVSGEMSIETAWILSIIVALTGLILTIKLNCGPLFISLYCVSIFAGFAYSVPPIRWKQYPFTNFLITISSHVGVNFTCYYASRAAFGLPFEMSPPFTFILAFMTVMGMTIAFAKDISDIEGDAKYGVSTVATKLGARNMTFVVSGVLLLTYVSAILAAIIWPQAFKSNVMLLSHAILAFCLIFQTRELALANYASAPSRQFFEFIWKLHYAEYLVYVFI

SEQ ID NO: 536 - protein, 702 aa, Artificial Sequence
  Synthetic
MSSPRAAFEAVFPSLAQDILDHAKKYNLPQNALEWLEKNLNTNVPGGKLNRGLSVPDTGVALLKKPLSEEQYKDLATLGWMTELLQAFFLVSDDLMDGSITRRGQPCWYRQPGVGLIAIWDAFLLESGIYIILKKQFRSHPAYIDIVELFHETTWQTELGQLCDLITAPEDKVDLDNFSMEKYMFIVTYKTAYYSFYLPVALALLYLQLATPENLQQAHDILIPLGQYFQVQDDYLDAYGDPEVIGKIGTDIQDNKCSWIVNQALQRCNAEQRKLLDTCYGRKDAALEAKVKELFKELDLETVYKEYEEKIVGEIKTKIAAVDESQGLKKEVFEAFLGKIYKRTKGGGGSGGGGSGGGGSGGGGSGGGGSGGGGSGGGGSSAGSDQIEGSPHHESDNSIATKILNFGHTCWKLQRPYVVKGMISIACGLFGRELFHNTNLLSWSLMLKAFSSLMVILSFNFFAAIMNQIYDVDIDRINKPDLPLVSGEMSIETAWILSIIVALTGLILTIKLNCGPLFISLYCVSIFAGFAYSVPPIRWKQYPFTNFLITISSHVGVNFTCYYASRAAFGLPFEMSPPFTFILAFMTVMGMTIAFAKDISDIEGDAKYGVSTVATKLGARNMTFVVSGVLLLTYVSAILAAIIWPQAFKSNVMLLSHAILAFCLIFQTRELALANYASAPSRQFFEFIWKLHYAEYLVYVFI

SEQ ID NO: 537 - protein, 704 aa, Artificial Sequence
  Synthetic
MAKSAALEKFESIFPTLVEDVLAHSKSYGLPQQALDWFKANLNANAIGGKCNRGMSVPDSVSLMTGKELNEEEYFKAATLGWLTELLQAYWLVSDDIMDSSITRRGVPCWYRQPEVGMIAINDAFMLESAIYILLKKYFRSHKSYVDLMELFHEVTFQTELGQTCDLLTAPEDKVDLDNFSMEKYTFIVIYKTAYYSFYLPVALALHQLGIATEKNLKQAEAILIPLGTYFQIQDDYLDNFGDPAHIGKIGTDILDNKCSWLVNKALLIATPEQRKVLEENYGRKNKDNEAVVKKLYNELALEKLYQEYEESEVTKIKKLIEETDESEGLKKSVFESFLGKIYKRTKGGGGSGGGGSGGGGSGGGGSGGGGSGGGGSGGGGSSAGSDQIEGSPHHESDNSIATKILNFGHTCWKLQRPYVVKGMISIACGLFGRELFHNTNLLSWSLMLKAFSSLMVILSFNFFAAIMNQIYDVDIDRINKPDLPLVSGEMSIETAWILSIIVALTGLILTIKLNCGPLFISLYCVSIFAGFAYSVPPIRWKQYPFTNFLITISSHVGVNFTCYYASRAAFGLPFEMSPPFTFILAFMTVMGMTIAFAKDISDIEGDAKYGVSTVATKLGARNMTFVVSGVLLLTYVSAILAAIIWPQAFKSNVMLLSHAILAFCLIFQTRELALANYASAPSRQFFEFIWKLHYAEYLVYVFI

SEQ ID NO: 538 - protein, 709 aa, Artificial Sequence
  Synthetic
MAALTNGQDRRARFTAVFPKLQKELIEFVIAQGFPQEALSWFQRNLEYNAPGGKLNRGMSVVDTLEILRGEPLSEEEYFKSALLGWCVELLQAFFLVSDDIMDTSITRRGQPCWYRVEGVGMIAIWDAFMLEGAIYHLLKSHFRKDSYYVDLLDLFHETTFQTELGQLIDLITAPEDHIDLDRFSLRKHQLIVIYKTAYYSFYLPVALAMYMAGIQDQAAFKQAQDILIPLGEYFQVQDDYLDCYGAPEFIGKIGTDILDNKCSWNVNVALAACTPEQRRVLDETYGRKDSICEAKVKEIFLAVDIPGKYAAYEQQSYEKINGLIDGIAETPGGLKRDVFRAFLSKIYKRTKGGGGSGGGGSGGGGSGGGGSGGGGSGGGGSGGGGSSAGSDQIEGSPHHESDNSIATKILNFGHTCWKLQRPYVVKGMISIACGLFGRELFHNTNLLSWSLMLKAFSSLMVILSFNFFAAIMNQIYDVDIDRINKPDLPLVSGEMSIETAWILSIIVALTGLILTIKLNCGPLFISLYCVSIFAGFAYSVPPIRWKQYPFTNFLITISSHVGVNFTCYYASRAAFGLPFEMSPPFTFILAFMTVMGMTIAFAKDISDIEGDAKYGVSTVATKLGARNMTFVVSGVLLLTYVSAILAAIIWPQAFKSNVMLLSHAILAFCLIFQTRELALANYASAPSRQFFEFIWKLHYAEYLVYVFI

SEQ ID NO: 539 - protein, 704 aa, Artificial Sequence
  Synthetic
MATKATRADFEKVFPSLVEDLLGEARKYNLPDNALQWFERSLNANTPGGKLNRGMSVPDTGSQLLERPLSPEEFKDLATLGWLTELLQAFWLVSDDIMDASITRRGEPCWYRREGVGMIAINDSFMLESGIYLILKKHFRSHPAYLDLIELFHEVTWQTELGQLCDLITAPEDHVDLNNFSMEKYTFIVIYKTAYYSFYLPVALALHYLRLATPQNLKQAHDILIPLGEYFQIQDDYLDAFGDPSVIGKIGTDIKDNKCGWLINQALQICTPEQRKVLDENYGQKDDAKEAKVKELYNELQLEKRYRDYEEKRVGEIRQMIANVDESAGLKKGVFEEYLAKIYKRSKGGGGSGGGGSGGGGSGGGGSGGGGSGGGGSGGGGSSAGSDQIEGSPHHESDNSIATKILNFGHTCWKLQRPYVVKGMISIACGLFGRELFHNTNLLSWSLMLKAFSSLMVILSFNFFAAIMNQIYDVDIDRINKPDLPLVSGEMSIETAWILSIIVALTGLILTIKLNCGPLFISLYCVSIFAGFAYSVPPIRWKQYPFTNFLITISSHVGVNFTCYYASRAAFGLPFEMSPPFTFILAFMTVMGMTIAFAKDISDIEGDAKYGVSTVATKLGARNMTFVVSGVLLLTYVSAILAAIIWPQAFKSNVMLLSHAILAFCLIFQTRELALANYASAPSRQFFEFIWKLHYAEYLVYVFI

SEQ ID NO: 540 - protein, 704 aa, Artificial Sequence
  Synthetic
MATRISRSEFEAFVAPLIEEIIQSTEQYKLPENARQWFEASLKANIVGGKMNRGMSVPDTASILLGRPLTADELKHLALLGWFTELLQAFFLVSDDIMDSSITRRGQPCWYRQEGVGLIAIWDAFMLESAIYVILKKYFRSHPAYVDLLELFHETTYQTELGQLCDLITAPEDKVDLDNFSMEKYTFIVKYKTAYYSFYLPVTLALHYLQLATPNNLKQCEDILIPLGEYFQIQDDYLDAFGLPETIGKIGTDIQDNKCSWLVNQALTMVTPEQRQLLNEAYGRKDSALEAKVKALYNDLKLEQHYLNFEEERVGNLRRQISAVDESEGLKKEIFSAFLDKIYKRSKGGGGSGGGGSGGGGSGGGGSGGGGSGGGGSGGGGSSAGSDQIEGSPHHESDNSIATKILNFGHTCWKLQRPYVVKGMISIACGLFGRELFHNTNLLSWSLMLKAFSSLMVILSFNFFAAIMNQIYDVDIDRINKPDLPLVSGEMSIETAWILSIIVALTGLILTIKLNCGPLFISLYCVSIFAGFAYSVPPIRWKQYPFTNFLITISSHVGVNFTCYYASRAAFGLPFEMSPPFTFILAFMTVMGMTIAFAKDISDIEGDAKYGVSTVATKLGARNMTFVVSGVLLLTYVSAILAAIIWPQAFKSNVMLLSHAILAFCLIFQTRELALANYASAPSRQFFEFIWKLHYAEYLVYVFI

SEQ ID NO: 541 - protein, 702 aa, Artificial Sequence
  Synthetic
MPVTLKEFESVFPQLVEDVLAHCKQYNLPDNALQWFKNSLNHNTVGGKCNRGMSVVDTSSLLLGRDLTKDEFFHSATLGWMIELLQAFFLVSDDIMDSSKTRRGSPCWYLMPDVGMIAIWDAFMLEASIYVLLKKYFRQNKHYIDLVELFHEVTFQTELGQACDLLTAPEDKVDLDNFSLEKYTFIVIYKTAYYSFYLPVALALYFCDQATPKNLQIAKDILIPMGEYFQIQDDYLDNFADPTVLGKIGTDIQDNKCSWLVNQALKIATPEQRQVLEKNYGRKDAACEAEVKKLYEELNLKKIYEDYEEKRVSEIRDMIANIDESEGLKKSVFEEFLRKIYKRSKGGGGSGGGGSGGGGSGGGGSGGGGSGGGGSGGGGSSAGSDQIEGSPHHESDNSIATKILNFGHTCWKLQRPYVVKGMISIACGLFGRELFHNTNLLSWSLMLKAFSSLMVILSFNFFAAIMNQIYDVDIDRINKPDLPLVSGEMSIETAWILSIIVALTGLILTIKLNCGPLFISLYCVSIFAGFAYSVPPIRWKQYPFTNFLITISSHVGVNFTCYYASRAAFGLPFEMSPPFTFILAFMTVMGMTIAFAKDISDIEGDAKYGVSTVATKLGARNMTFVVSGVLLLTYVSAILAAIIWPQAFKSNVMLLSHAILAFCLIFQTRELALANYASAPSRQFFEFIWKLHYAEYLVYVFI

SEQ ID NO: 542 - protein, 704 aa, Artificial Sequence
  Synthetic
MAAKTNRADFESVFPSLVKDVSDHAMQYGLPSAALEWFQNSMNANTPGGKLNRGLSVPDTGLALLEKPLNDEQFKHLCTLGWMTEFLQAFFLVSDDMMDSSITRRGEPCWYRRPNVGMIAIWDAFMLESTIYVLLKKHFRSHPAYVDFLELFHEVSFQTELGQLCDLLTAPEDNVDLNNFNMDKFNFIVIYKTAYYSFYLPVALALHYLQLATPSNLRQAHDILIPLGQYFQAQDDYLDVFGKPEQIGKIGTDIQDNKCSWVINQALKRCSAEQRKVLDESYGRKDAAMEAKVKVVFNELNLEKVYRDFEEEQVGKIRTMIAGLDESEGLKKGVFESFLAKIYKRDKGGGGSGGGGSGGGGSGGGGSGGGGSGGGGSGGGGSSAGSDQIEGSPHHESDNSIATKILNFGHTCWKLQRPYVVKGMISIACGLFGRELFHNTNLLSWSLMLKAFSSLMVILSFNFFAAIMNQIYDVDIDRINKPDLPLVSGEMSIETAWILSIIVALTGLILTIKLNCGPLFISLYCVSIFAGFAYSVPPIRWKQYPFTNFLITISSHVGVNFTCYYASRAAFGLPFEMSPPFTFILAFMTVMGMTIAFAKDISDIEGDAKYGVSTVATKLGARNMTFVVSGVLLLTYVSAILAAIIWPQAFKSNVMLLSHAILAFCLIFQTRELALANYASAPSRQFFEFIWKLHYAEYLVYVFI

SEQ ID NO: 543 - protein, 704 aa, Artificial Sequence
  Synthetic
MAKSASLEKFESIFPTLVEDVLAHSKSYGLPQQALDWFKNNLNANAIGGKCNRGMSVPDSVSLMTGKELNEEEYFKAATLGWLTELLQAYFLVSDDIMDSSITRRGVPCWYRQPEVGMIAIWDAFMLESAIYILLKKYFRSHKSYVDLMELFHEVTFQTELGQTCDLLTAPEDKVDLDNFSMEKYTFIVIYKTAYYSFYLPVALALHQLGIATEKNLKQAEAILIPLGTYFQIQDDYLDNFGDPEHIGKIGTDILDNKCSWLVNKALLIATPEQRKVLEENYGRKNKDNEAVVKKLYDELALEKLYQEYEESEVGKIRKLIDGTDESEGLKKSVFESFLGKIYKRTKGGGGSGGGGSGGGGSGGGGSGGGGSGGGGSGGGGSSAGSDQIEGSPHHESDNSIATKILNFGHTCWKLQRPYVVKGMISIACGLFGRELFHNTNLLSWSLMLKAFSSLMVILSFNFFAAIMNQIYDVDIDRINKPDLPLVSGEMSIETAWILSIIVALTGLILTIKLNCGPLFISLYCVSIFAGFAYSVPPIRWKQYPFTNFLITISSHVGVNFTCYYASRAAFGLPFEMSPPFTFILAFMTVMGMTIAFAKDISDIEGDAKYGVSTVATKLGARNMTFVVSGVLLLTYVSAILAAIIWPQAFKSNVMLLSHAILAFCLIFQTRELALANYASAPSRQFFEFIWKLHYAEYLVYVFI

SEQ ID NO: 544 - protein, 708 aa, Artificial Sequence
  Synthetic
MSKESNRAKFVAEFPELVKELKSVLTGYGMPAEAVKWYEDSLNYNTPGGKLNRGLSVVDTYAILKGYASVDDLPVEVYKKVALLGWCIELLQAYFLVADDMMDQSITRRGQPCWYRVKEVGDIAIWDAFMLEGAIYVLLKKHFRQEPYYVDLIELFHDVTFQTELGQLLDLITAPEDKVDLSKFSLEKHSFIVTFKTAYYSFYLPVALAMYVAGISDPKDLQQAHDVLIPLGEYFQIQDDYLDCFGTAEQIGKIGTDIQDNKCSWVVNKALQLASPEQRKLLDENYGKKDAECEARCKKLFHDLDIQKHYQAYEEKVAQDLRAKIAQTDESRGFRAQVLTAFLNKVYKRSKGGGGSGGGGSGGGGSGGGGSGGGGSGGGGSGGGGSSAGSDQIEGSPHHESDNSIATKILNFGHTCWKLQRPYVVKGMISIACGLFGRELFHNTNLLSWSLMLKAFSSLMVILSFNFFAAIMNQIYDVDIDRINKPDLPLVSGEMSIETAWILSIIVALTGLILTIKLNCGPLFISLYCVSIFAGFAYSVPPIRWKQYPFTNFLITISSHVGVNFTCYYASRAAFGLPFEMSPPFTFILAFMTVMGMTIAFAKDISDIEGDAKYGVSTVATKLGARNMTFVVSGVLLLTYVSAILAAIIWPQAFKSNVMLLSHAILAFCLIFQTRELALANYASAPSRQFFEFIWKLHYAEYLVYVFI

SEQ ID NO: 545 - protein, 704 aa, Artificial Sequence
  Synthetic
MAQQTTLQEFNSVYPKLEEALLDHARSYKLPQEQLDWYKRSLEVNPLGGKCNRGMSVPDSVSLLLEKPLTEEQYFQAATLGWMTELLQAFFLVSDDIMDSSITRRGQPCWYRQEGVGMIAIWDAFMLESAIYTLLKKYFRSHPAYVDLIELFHETTFQTELGQLCDLLTAPEDNVNLDNFSLEKYSFIVIYKTAYYSFYLPVALALHQLNLATPSNLKQAEDILIPLGEYFQIQDDYLDNFGKPEHIGKIGTDIKDNKCSWLVNQALAVATPEQRKILEENYGRKDDEKEKVVKKLYDDLNLEQRYLDYEEKVVGQIRERIANIDENEGLKKTVFEAFLAKIYKRSKGGGGSGGGGSGGGGSGGGGSGGGGSGGGGSGGGGSSAGSDQIEGSPHHESDNSIATKILNFGHTCWKLQRPYVVKGMISIACGLFGRELFHNTNLLSWSLMLKAFSSLMVILSFNFFAAIMNQIYDVDIDRINKPDLPLVSGEMSIETAWILSIIVALTGLILTIKLNCGPLFISLYCVSIFAGFAYSVPPIRWKQYPFTNFLITISSHVGVNFTCYYASRAAFGLPFEMSPPFTFILAFMTVMGMTIAFAKDISDIEGDAKYGVSTVATKLGARNMTFVVSGVLLLTYVSAILAAIIWPQAFKSNVMLLSHAILAFCLIFQTRELALANYASAPSRQFFEFIWKLHYAEYLVYVFI

SEQ ID NO: 546 - protein, 708 aa, Artificial Sequence
  Synthetic
MSKEDKRNKFLSVFPQLVDELKSILAGYGMTQDALQWYENSLNYNTPGGKLNRGLSVVDTYAILKGKSSYEELSEEEYFKLAMLGWCIELLQAYWLVADDMMDKSITRRGQPCWYRVPEVGEVAINDAFMLEGAIYCLLKNHFKKEAYYVDLLELFHDVTFQTELGQMLDLITAPEDRVDLDKFSLERHSFIVRFKTAYYSFYLPVALAMYVAGVSDEQDLKQAQDVLIPLGEYFQIQDDFLDCFGKPEDIGKIGTDIQDNKCSWVVNTALKLCSAEQRKVLDANYGRKNSESEAKCKQVFDDLKIDSIYHDYEEKTAQNLRNMIQNTDETRGFKSQVLTVFLEKVYKRKKGGGGSGGGGSGGGGSGGGGSGGGGSGGGGSGGGGSSAGSDQIEGSPHHESDNSIATKILNFGHTCWKLQRPYVVKGMISIACGLFGRELFHNTNLLSWSLMLKAFSSLMVILSFNFFAAIMNQIYDVDIDRINKPDLPLVSGEMSIETAWILSIIVALTGLILTIKLNCGPLFISLYCVSIFAGFAYSVPPIRWKQYPFTNFLITISSHVGVNFTCYYASRAAFGLPFEMSPPFTFILAFMTVMGMTIAFAKDISDIEGDAKYGVSTVATKLGARNMTFVVSGVLLLTYVSAILAAIIWPQAFKSNVMLLSHAILAFCLIFQTRELALANYASAPSRQFFEFIWKLHYAEYLVYVFI

SEQ ID NO: 547 - protein, 707 aa, Artificial Sequence
  Synthetic
MDKAAARQKFVAEFDNLVKELQEISAGYNMPKEAIEWFTKNLEYNTPGGKLNRGLSVIDTYCILKNKTVESLAADEYKKVALLGWAIELLQAYFLVADDMMDQSKTRRGQPCWYLAEGVGNIAIWDSFMLEGAIYILLKKHFRQDLYYVDLLDLFHEVTFQTELGQLLDLVTADEEHVDLSKFSLEKHSFIVIFKTAYYSFYLPVALAMYMCGINSDEDLKQVKDVLIPLGEYFQIQDDYLDCFGTPEQIGKIGTDIKDNKCSWVVNQALLKANESQRQVLDDNYGKKDDESEQRVKDLFAELQIPSIYEQYEEEVVAKLRAQIEKIDESRGLKKEVLSSFLAKVYKRSKGGGGSGGGGSGGGGSGGGGSGGGGSGGGGSGGGGSSAGSDQIEGSPHHESDNSIATKILNFGHTCWKLQRPYVVKGMISIACGLFGRELFHNTNLLSWSLMLKAFSSLMVILSFNFFAAIMNQIYDVDIDRINKPDLPLVSGEMSIETAWILSIIVALTGLILTIKLNCGPLFISLYCVSIFAGFAYSVPPIRWKQYPFTNFLITISSHVGVNFTCYYASRAAFGLPFEMSPPFTFILAFMTVMGMTIAFAKDISDIEGDAKYGVSTVATKLGARNMTFVVSGVLLLTYVSAILAAIIWPQAFKSNVMLLSHAILAFCLIFQTRELALANYASAPSRQFFEFIWKLHYAEYLVYVFI

SEQ ID NO: 548 - protein, 735 aa, Artificial Sequence
  Synthetic
MPAPTNPTEIALQASTTNGMSSAEKKKQARAKFEGVYQVLRKDLLDHFAGEGMPKDAIEWYSRNLDYNVPGGKLNRGMSVVDSVEIIKGRALTDEEYLKSAILGWCIELLQAFFLVSDDLMDSSVTRRGQPCWYRVENVGLISIWDAFMLEGAIYHLLKKYFRQDSYYVELLDLFHDVTYKTEMGQLIDLITAPEDHVDLDKFSLKKHQLIVIYKTAFYSFYLPVALAMHVCGIPPSPNSPSDPYKLAHEILIPLGEYFQVQDDFLDFGGTPEQIGKIGTDILDNKCSWCINTALAVATLEQRRVLDENYGRKDAAKEAKVKEVFEQVEIRRRYEEYEQTAYERINGLIETIPADAKDGELKREVFTSFLSKIYKRTKGGGGSGGGGSGGGGSGGGGSGGGGSGGGGSGGGGSSAGSDQIEGSPHHESDNSIATKILNFGHTCWKLQRPYVVKGMISIACGLFGRELFHNTNLLSWSLMLKAFSSLMVILSFNFFAAIMNQIYDVDIDRINKPDLPLVSGEMSIETAWILSIIVALTGLILTIKLNCGPLFISLYCVSIFAGFAYSVPPIRWKQYPFTNFLITISSHVGVNFTCYYASRAAFGLPFEMSPPFTFILAFMTVMGMTIAFAKDISDIEGDAKYGVSTVATKLGARNMTFVVSGVLLLTYVSAILAAIIWPQAFKSNVMLLSHAILAFCLIFQTRELALANYASAPSRQFFEFIWKLHYAEYLVYVFI

SEQ ID NO: 549 - protein, 708 aa, Artificial Sequence
  Synthetic
MDKSTARSKFLDVFPELVSDLETVTKEYGMPQDAIEWFKRNLNYNTPGGKLNRGLSVVDTYALLKGYKSFDDFEPEEYKKTAILGWAVELLQAYFLVADDMMDKSITRRGQPCWYRVDGVNEIAIWDSFMLEAAIYVLLKKYFRKDSYYVDLLELFHEVTFQTELGQLLDLLTAPEDHVDLSKFSLSKHSFIVTFKTAYYSFYLPVALAMYMAGVSDEKDLKQAQDVLIPLGEYFQIQDDYLDCFGKPEDIGKIGTDILDNKCSWVINTALKICTPEQRAILDENYGRKDSAKEAKCKQIFKDLKIDQLYLEYEEKVATELRSKIANVDESRGFKGEVLTSFLNKIYKRQKGGGGSGGGGSGGGGSGGGGSGGGGSGGGGSGGGGSSAGSDQIEGSPHHESDNSIATKILNFGHTCWKLQRPYVVKGMISIACGLFGRELFHNTNLLSWSLMLKAFSSLMVILSFNFFAAIMNQIYDVDIDRINKPDLPLVSGEMSIETAWILSIIVALTGLILTIKLNCGPLFISLYCVSIFAGFAYSVPPIRWKQYPFTNFLITISSHVGVNFTCYYASRAAFGLPFEMSPPFTFILAFMTVMGMTIAFAKDISDIEGDAKYGVSTVATKLGARNMTFVVSGVLLLTYVSAILAAIIWPQAFKSNVMLLSHAILAFCLIFQTRELALANYASAPSRQFFEFIWKLHYAEYLVYVFI

SEQ ID NO: 550 - protein, 704 aa, Artificial Sequence
  Synthetic
MATRISRSEFEGFVHPLIKDILEATEQYNLPENARKWFSDSLNANIVGGKMNRGMSVPDTGSILLGRPLTDEEKKHLSLLGWFTELLQAFFLVSDDIMDGSITRRGQPCWYRREGVGMIAIWDAFMLESAIYVILKKYFRSHPAYTDLLELFHETTWQTELGQLCDLITAPEDHVDLNNFSMEKYTFIVKYKTAYYSFYLPVTLALHYLQVATPKNLKQCEDILIPLGEYFQIQDDYLDAFGSPETIGKIGTDIQDNKCSWLVNRALTIVTPEQRKLLDEAYGRKDSALEAKVKALYNDIKLEQHYLKFEEQRVGQLRQQIEAVDESEGLKKEVFSAFLEKIYKRSKGGGGSGGGGSGGGGSGGGGSGGGGSGGGGSGGGGSSAGSDQIEGSPHHESDNSIATKILNFGHTCWKLQRPYVVKGMISIACGLFGRELFHNTNLLSWSLMLKAFSSLMVILSFNFFAAIMNQIYDVDIDRINKPDLPLVSGEMSIETAWILSIIVALTGLILTIKLNCGPLFISLYCVSIFAGFAYSVPPIRWKQYPFTNFLITISSHVGVNFTCYYASRAAFGLPFEMSPPFTFILAFMTVMGMTIAFAKDISDIEGDAKYGVSTVATKLGARNMTFVVSGVLLLTYVSAILAAIIWPQAFKSNVMLLSHAILAFCLIFQTRELALANYASAPSRQFFEFIWKLHYAEYLVYVFI

SEQ ID NO: 551 - protein, 736 aa, Artificial Sequence
  Synthetic
MGADRQAFEGFFPQVVRDLTADGLRHPEVGDAVARLKEVLEYNSPGGKHTRGLTVLAAFRRLVQPEQQGPDSVRCALAVGWCIELLQAFFLVADDIMDSSLTRRGQPCWYKKEGIGLDAVWDSFLLESSIYRLLKKYCRGQPYYLHLLELFLQTSYQTELGQALDLITAPPTQVDLARFTEQRYKAIVKYKTAFYSFYLPVAAAMYMAGIESEEEHANAKAILLEMGEFFQIQDDFLDCFGDPSLTGKIGTDIQDNKCSWLVVECLRRASPEQRKLLEENYGQKELEKVARVKELYEALGLRAVYQEYEDSSFQHLQQLIEVHTPHLPKEIFLDLAHVIYKRQNEHRSASCCPDAWARTGRQQVQTAATWQRVVDDLSGGGGGSGGGGSGGGGSGGGGSGGGGSGGGGSGGGGSSAGSDQIEGSPHHESDNSIATKILNFGHTCWKLQRPYVVKGMISIACGLFGRELFHNTNLLSWSLMLKAFSSLMVILSFNFFAAIMNQIYDVDIDRINKPDLPLVSGEMSIETAWILSIIVALTGLILTIKLNCGPLFISLYCVSIFAGFAYSVPPIRWKQYPFTNFLITISSHVGVNFTCYYASRAAFGLPFEMSPPFTFILAFMTVMGMTIAFAKDISDIEGDAKYGVSTVATKLGARNMTFVVSGVLLLTYVSAILAAIIWPQAFKSNVMLLSHAILAFCLIFQTRELALANYASAPSRQFFEFIWKLHYAEYLVYVFI

SEQ ID NO: 552 - protein, 704 aa, Artificial Sequence
  Synthetic
MASTTKRADFEAVFPGLAKDILEHAKRYNLPANALEWFEKSLFANTPGGKLNRGLSVPDTGLALLKKPLTEEQFEHLSILGWLTELLQAFWLVSDDIMDSSITRRGQPCWYRQEGVGLIAINDAFMLESAIYLILKQRFRSHPAYIDLVELFHETTWQTELGQLCDLITAPEDHVNLDNFSMEKYMFIVTYKTAYYSFYLPVALALLYLQVATPETLKQAHDILIPLGQYFQIQDDYLDNFGDPSVIGKIGTDIQDNKCSWLVNQAIARATPEQRAVLDSAYGRKDKEQELKVKKIFDDLELEKVYKEYEEKVVGELRAKIAAVDETTGLKKEVFESFLAKIYKRTKGGGGSGGGGSGGGGSGGGGSGGGGSGGGGSGGGGSSAGSDQIEGSPHHESDNSIATKILNFGHTCWKLQRPYVVKGMISIACGLFGRELFHNTNLLSWSLMLKAFSSLMVILSFNFFAAIMNQIYDVDIDRINKPDLPLVSGEMSIETAWILSIIVALTGLILTIKLNCGPLFISLYCVSIFAGFAYSVPPIRWKQYPFTNFLITISSHVGVNFTCYYASRAAFGLPFEMSPPFTFILAFMTVMGMTIAFAKDISDIEGDAKYGVSTVATKLGARNMTFVVSGVLLLTYVSAILAAIIWPQAFKSNVMLLSHAILAFCLIFQTRELALANYASAPSRQFFEFIWKLHYAEYLVYVFI

SEQ ID NO: 553 - protein, 710 aa, Artificial Sequence
  Synthetic
MSAALTNGQDRRARFTAVFPKLEKELLDFVTAQGFPQEAISWFQRNLDYNAPGGKLNRGMSVVDSLEILRGGPLSEEEYFKSALLGWCVELLQAFFLVSDDIMDSSITRRGQPCWYRVEGIGMIAIWDSFMLEGSIYHLLKSHFRKDSYYVDLLDLFHETTFQTELGQLIDLITAPEDHIDLNRFSLRKHQLIVIYKTAYYSFYLPVALAMHMAGIKDEAAFKHAQDILIPLGEYFQVQDDYLDCYGAPEFIGKIGTDILDNKCSWNVNVALANCSPEQRKVLDENYGRKDAACEAKVKEVFLAVDIPGKYAVYEQESYEKINGLINAIDETPGGLKRDVFRAFLAKIYKRTKGGGGSGGGGSGGGGSGGGGSGGGGSGGGGSGGGGSSAGSDQIEGSPHHESDNSIATKILNFGHTCWKLQRPYVVKGMISIACGLFGRELFHNTNLLSWSLMLKAFSSLMVILSFNFFAAIMNQIYDVDIDRINKPDLPLVSGEMSIETAWILSIIVALTGLILTIKLNCGPLFISLYCVSIFAGFAYSVPPIRWKQYPFTNFLITISSHVGVNFTCYYASRAAFGLPFEMSPPFTFILAFMTVMGMTIAFAKDISDIEGDAKYGVSTVATKLGARNMTFVVSGVLLLTYVSAILAAIIWPQAFKSNVMLLSHAILAFCLIFQTRELALANYASAPSRQFFEFIWKLHYAEYLVYVFI

SEQ ID NO: 554 - protein, 711 aa, Artificial Sequence
  Synthetic
MVAATNSLSKEDKRAKFEAVFPILVDEIVDYLTSVNVPQDAKDWFKKSLYHNTLGGKYNRGLSVIDTYEILSGKALDDNSYFRAALLGWCIELLQAFWLVADDMMDESKTRRGQPCWYLMPNVGSIAINDSFMLESAIYFLLKKHFRHETYYVDLLDLFHEVTFQTTLGQELDLLTAPENHVDLSKFSQDKHAFIVIFKTAYYSFYLPVALAMCMANVATPDNLQRASDVLIPLGKYFQIQDDYLDCYGDPSVTGKVGTDILDNKCSWLINVALAKASPEQRKVLDENYGRKDADCEKRVKAVFEELNLKKAYEEYEESEVSTIKQRISVLDESAGLKKEAFTTFLNKIYKRSKGGGGSGGGGSGGGGSGGGGSGGGGSGGGGSGGGGSSAGSDQIEGSPHHESDNSIATKILNFGHTCWKLQRPYVVKGMISIACGLFGRELFHNTNLLSWSLMLKAFSSLMVILSFNFFAAIMNQIYDVDIDRINKPDLPLVSGEMSIETAWILSIIVALTGLILTIKLNCGPLFISLYCVSIFAGFAYSVPPIRWKQYPFTNFLITISSHVGVNFTCYYASRAAFGLPFEMSPPFTFILAFMTVMGMTIAFAKDISDIEGDAKYGVSTVATKLGARNMTFVVSGVLLLTYVSAILAAIIWPQAFKSNVMLLSHAILAFCLIFQTRELALANYASAPSRQFFEFIWKLHYAEYLVYVFI

SEQ ID NO: 555 - protein, 706 aa, Artificial Sequence
  Synthetic
MADKAAVKQKFIDSFDPLVEDLLAVLKQYNISPEATEWFKKSLYYNGVGGKLNRGLSVIDTYQILTGKNELTDEEYKKAAVLGWGIELLQGFFLVSDDIMDASKTRRGQPCWYLVPKVGMIAIWDAFMLETAIYFLLKKYFRSEPYYIDLVELFHDVTFQTELGQLLDLITAPEDEVDLSKFSLAKHSFIVIYKTAYYSFYLPVALAMYMAGVSKPEDLKQAHDVLIPLGEYFQIQDDYLDCYGDPAFIGKIGTDILDNKCSWLINTALKKANPEQRKILDENYGQKNGACEAKVKAVYNELDLENEYFKYEEDAVGRIKTLIDNVDESRGFKKDVLSAFLAKIYKRQKGGGGSGGGGSGGGGSGGGGSGGGGSGGGGSGGGGSSAGSDQIEGSPHHESDNSIATKILNFGHTCWKLQRPYVVKGMISIACGLFGRELFHNTNLLSWSLMLKAFSSLMVILSFNFFAAIMNQIYDVDIDRINKPDLPLVSGEMSIETAWILSIIVALTGLILTIKLNCGPLFISLYCVSIFAGFAYSVPPIRWKQYPFTNFLITISSHVGVNFTCYYASRAAFGLPFEMSPPFTFILAFMTVMGMTIAFAKDISDIEGDAKYGVSTVATKLGARNMTFVVSGVLLLTYVSAILAAIIWPQAFKSNVMLLSHAILAFCLIFQTRELALANYASAPSRQFFEFIWKLHYAEYLVYVFI

SEQ ID NO: 556 - protein, 703 aa, Artificial Sequence
  Synthetic
MTSKSELELFLSLYEPLKAQIVSDLENFEANQEMVERIKLVMDYSILGGKMNRGISVLSTVKLIKGESITKDLQEKAIILGWCIEWLQAFFLVADDIMDDSPMRRGKPAWYRNDNVGMIAIWDSFLIESFIFRILKIHFRQQSYYIDLIELFHEVIYQTELGQMLDLITSPTSVNLDLFNLDKHHFIVKYKTSFYSFYLPVALALLACGETPDSKSFDISRDILVPMGVYFQVQDDYLDLYGDVKLTGKVGTDIKDNKCSWLVIKALSKCNPEQRKILDLHYGKKSDEDEAIVKKLYQELDVQGMFLEYANETEAHLNNMISNVDKSEINPQIFYSFLNKISHRQKGGGGSGGGGSGGGGSGGGGSGGGGSGGGGSGGGGSSAGSDQIEGSPHHESDNSIATKILNFGHTCWKLQRPYVVKGMISIACGLFGRELFHNTNLLSWSLMLKAFSSLMVILSFNFFAAIMNQIYDVDIDRINKPDLPLVSGEMSIETAWILSIIVALTGLILTIKLNCGPLFISLYCVSIFAGFAYSVPPIRWKQYPFTNFLITISSHVGVNFTCYYASRAAFGLPFEMSPPFTFILAFMTVMGMTIAFAKDISDIEGDAKYGVSTVATKLGARNMTFVVSGVLLLTYVSAILAAIIWPQAFKSNVMLLSHAILAFCLIFQTRELALANYASAPSRQFFEFIWKLHYAEYLVYVFI

SEQ ID NO: 557 - protein, 709 aa, Artificial Sequence
  Synthetic
MASEKEIRRERFLNVFPKLVEELNASLLAYGMPKEACDWYAHSLNYNTPGGKLNRGLSVVDTYAILSNKTVEQLGQEEYEKVAILGWCIELLQAYFLVADDMMDKSITRRGQPCWYKVPEVGEIAIWDAFMLEAAIYKLLKSHFRNEKYYIDITELFHEVTFQTELGQLMDLITAPEDKVDLSKFSLKKHSFIVTFKTAYYSFYLPVALAMYVAGITDEKDLKQARDVLIPLGEYFQIQDDYLDCFGTPEQIGKIGTDIQDNKCSWVINKALELASAEQRKTLDENYGKKDSVAEAKCKKIFNDLKIEQLYHEYEESIAKDLKAKISQVDESRGFKADVLTAFLNKVYKRSKGGGGSGGGGSGGGGSGGGGSGGGGSGGGGSGGGGSSAGSDQIEGSPHHESDNSIATKILNFGHTCWKLQRPYVVKGMISIACGLFGRELFHNTNLLSWSLMLKAFSSLMVILSFNFFAAIMNQIYDVDIDRINKPDLPLVSGEMSIETAWILSIIVALTGLILTIKLNCGPLFISLYCVSIFAGFAYSVPPIRWKQYPFTNFLITISSHVGVNFTCYYASRAAFGLPFEMSPPFTFILAFMTVMGMTIAFAKDISDIEGDAKYGVSTVATKLGARNMTFVVSGVLLLTYVSAILAAIIWPQAFKSNVMLLSHAILAFCLIFQTRELALANYASAPSRQFFEFIWKLHYAEYLVYVFI

SEQ ID NO: 558 - protein, 704 aa, Artificial Sequence
  Synthetic
MAKSAALEKFESIFPTLVEDVLAHSKSYNLPQQALDWFKNSLNANAIGGKCNRGMSVPDSVALMTGKELSEDEYFHAATLGWMTELLQAFWLVSDDIMDSSITRRGAPCWYRQPEVGMIAINDAFMLEAAIYILLKKYFRQHKSYVDLLELFHEVTFQTELGQTCDLLTAPEDKVDLDNFSMEKYTFIVIYKTAYYSFYLPVALALHQLGIATEKNLKQAEDILIPLGTYFQIQDDYLDNFGNPEHIGKIGTDILDNKCSWLVNKALLIATPEQRKVLEENYGRKNKDNEAVVKKLYDELALEKLYQEYEEAEVGKIRKLIEEVDESEGLKKSVFESFLGKIYKRTKGGGGSGGGGSGGGGSGGGGSGGGGSGGGGSGGGGSSAGSDQIEGSPHHESDNSIATKILNFGHTCWKLQRPYVVKGMISIACGLFGRELFHNTNLLSWSLMLKAFSSLMVILSFNFFAAIMNQIYDVDIDRINKPDLPLVSGEMSIETAWILSIIVALTGLILTIKLNCGPLFISLYCVSIFAGFAYSVPPIRWKQYPFTNFLITISSHVGVNFTCYYASRAAFGLPFEMSPPFTFILAFMTVMGMTIAFAKDISDIEGDAKYGVSTVATKLGARNMTFVVSGVLLLTYVSAILAAIIWPQAFKSNVMLLSHAILAFCLIFQTRELALANYASAPSRQFFEFIWKLHYAEYLVYVFI

SEQ ID NO: 559 - protein, 704 aa, Artificial Sequence
  Synthetic
MGKTTLKEFEAVFPLLVDEIMAVLEGYKISSEAAAWYRKVLEHNTVGGKCNRGMSVVDTYSTLTNQDKLSDEDYLRSAILGWCTELLQAFFLVSDDIMDGSKTRRGSPCWYLHEGVGNIAIWDAFMLESAIYILLKKHFRNTPYYIDLIELFHDVSFQTELGQLLDLITAPEDRVDLSKFSLEKHSFIVIFKTAYYSFYLPVALAMYMAGVATPENLKQAHDVLIPLGEYFQIQDDYLDCYGDPEHIGKIGTDIKDNKCGWLINQALAIATPEQRQVLDDNYGKKDDVAEARVKKVFLDLELEKRYQDYEETVVGKIRTLIEGIDETTGFKKDVLTNFLNKIYKRSKGGGGSGGGGSGGGGSGGGGSGGGGSGGGGSGGGGSSAGSDQIEGSPHHESDNSIATKILNFGHTCWKLQRPYVVKGMISIACGLFGRELFHNTNLLSWSLMLKAFSSLMVILSFNFFAAIMNQIYDVDIDRINKPDLPLVSGEMSIETAWILSIIVALTGLILTIKLNCGPLFISLYCVSIFAGFAYSVPPIRWKQYPFTNFLITISSHVGVNFTCYYASRAAFGLPFEMSPPFTFILAFMTVMGMTIAFAKDISDIEGDAKYGVSTVATKLGARNMTFVVSGVLLLTYVSAILAAIIWPQAFKSNVMLLSHAILAFCLIFQTRELALANYASAPSRQFFEFIWKLHYAEYLVYVFI

SEQ ID NO: 560 - protein, 708 aa, Artificial Sequence
  Synthetic
MSAEDKRNKFLGVFPALVDELKSILSGYGMTEDALKWYEDSLNYNTPGGKLNRGLSVVDTYAILKGKKSYADLSDEEYFKLAILGWCIELLQAYWLVADDMMDKSITRRGQPCWYRVPEVGEIAINDAFMLEGAIYCLLKKHFRSESYYVDLLELFHDVTFQTELGQLLDLITAPEDRVDLDKFSLERHSFIVRFKTAYYSFYLPVALAMYAAGINSEHDLQQAQAVLIPLGEYFQIQDDFLDCFGKPEDIGKIGTDIQDNKCSWVINTALKLCSADQRKVLDENYGRKDAESEARCKHVFHDLKIDSLYLEYEEKTAHDLRNLIQNTDESRGFKAQVLTAFLEKVYKRKKGGGGSGGGGSGGGGSGGGGSGGGGSGGGGSGGGGSSAGSDQIEGSPHHESDNSIATKILNFGHTCWKLQRPYVVKGMISIACGLFGRELFHNTNLLSWSLMLKAFSSLMVILSFNFFAAIMNQIYDVDIDRINKPDLPLVSGEMSIETAWILSIIVALTGLILTIKLNCGPLFISLYCVSIFAGFAYSVPPIRWKQYPFTNFLITISSHVGVNFTCYYASRAAFGLPFEMSPPFTFILAFMTVMGMTIAFAKDISDIEGDAKYGVSTVATKLGARNMTFVVSGVLLLTYVSAILAAIIWPQAFKSNVMLLSHAILAFCLIFQTRELALANYASAPSRQFFEFIWKLHYAEYLVYVFI

SEQ ID NO: 561 - protein, 704 aa, Artificial Sequence
  Synthetic
MPTTIKEFESVWPRIVADLQDHCKQYKLPQQSLDWFTKSLDYNTVGGKCNRGMSVIDTTSILQGKTLDPSSEEYFRAALLGWMIELLQAFFLVSDDIMDSSKTRRGSPCWYLAPKVGMIAIWDAFMLESSIYVLLKKHFRQETSYVDIVELFHEVTFQTECGQLCDLLTAPEDDVNLDNFSLDKFTFIVIYKTAYYSFYLPVALALYYAGAATPKNLKTAEDILVPMGEYFQAQDDYLDAFADPSVLGKIGTDIMDNKCSWLVNQALKKVNPEQRKLLDENYGQKDSQKEAKVKELYHELKLKEFYEQWEEDRVADLRAKIAQVDESEGLKKDIFELFLQKIYKRSKGGGGSGGGGSGGGGSGGGGSGGGGSGGGGSGGGGSSAGSDQIEGSPHHESDNSIATKILNFGHTCWKLQRPYVVKGMISIACGLFGRELFHNTNLLSWSLMLKAFSSLMVILSFNFFAAIMNQIYDVDIDRINKPDLPLVSGEMSIETAWILSIIVALTGLILTIKLNCGPLFISLYCVSIFAGFAYSVPPIRWKQYPFTNFLITISSHVGVNFTCYYASRAAFGLPFEMSPPFTFILAFMTVMGMTIAFAKDISDIEGDAKYGVSTVATKLGARNMTFVVSGVLLLTYVSAILAAIIWPQAFKSNVMLLSHAILAFCLIFQTRELALANYASAPSRQFFEFIWKLHYAEYLVYVFI

SEQ ID NO: 562 - protein, 704 aa, Artificial Sequence
  Synthetic
MASTTKRADFEAVFPGLAKDILEHAKRYNLPANALEWFEKSLFVNTPGGKLNRGLSVPDTGLALLQKPLTDEQFEHLSILGWLTELLQAFWLVSDDIMDSSITRRGQPCWYRHEGVGLIAINDAFMLESAIYLILKQRFKSHPSYIDLVELFHETTWQTELGQLCDLITAPEDNVNLDNFSMEKYMFIVTYKTAYYSFYLPVALALLYLQVATPETLKQAHDILIPLGQYFQIQDDYLDNFGDPSVIGKIGTDIQDNKCSWLVNQAIARATPEQRAVLDSAYGRKDKVQEAKVKKIFDELELEKVYKEYEEKVVGELRAKIAAVDETTGLKKEVFESFLAKIYKRTKGGGGSGGGGSGGGGSGGGGSGGGGSGGGGSGGGGSSAGSDQIEGSPHHESDNSIATKILNFGHTCWKLQRPYVVKGMISIACGLFGRELFHNTNLLSWSLMLKAFSSLMVILSFNFFAAIMNQIYDVDIDRINKPDLPLVSGEMSIETAWILSIIVALTGLILTIKLNCGPLFISLYCVSIFAGFAYSVPPIRWKQYPFTNFLITISSHVGVNFTCYYASRAAFGLPFEMSPPFTFILAFMTVMGMTIAFAKDISDIEGDAKYGVSTVATKLGARNMTFVVSGVLLLTYVSAILAAIIWPQAFKSNVMLLSHAILAFCLIFQTRELALANYASAPSRQFFEFIWKLHYAEYLVYVFI

SEQ ID NO: 563 - protein, 703 aa, Artificial Sequence
  Synthetic
MTTTQRADFEAVFPSLAQDLLDHAKKYNLPDNALEWFNNALHVNVPGGKLNRGLSVPDTGLALLQKPLTDEQFKHLSTLGWLTELLQAFFLVSDDIMDSSITRRGQPCWYRHQGVGLIAIWDAFMLESGIYVILKKHFRSHPAYIDLVELFHETAWQTELGQLCDLITAPEDHVDLDNFSMEKYMFIVTYKTAYYSFYLPVALALHYLQLATPENLKQTHDILIPLGQYFQVQDDYLDAYGDPAVIGKIGTDIKDNKCSWIINQALQLASAEQRKTLDAAYGRKDDELEAKVKVIYRELNLEKVYQDYEEKVVGEIRTKIGALDESQGLKKGVFEAFLSKIYKRSKGGGGSGGGGSGGGGSGGGGSGGGGSGGGGSGGGGSSAGSDQIEGSPHHESDNSIATKILNFGHTCWKLQRPYVVKGMISIACGLFGRELFHNTNLLSWSLMLKAFSSLMVILSFNFFAAIMNQIYDVDIDRINKPDLPLVSGEMSIETAWILSIIVALTGLILTIKLNCGPLFISLYCVSIFAGFAYSVPPIRWKQYPFTNFLITISSHVGVNFTCYYASRAAFGLPFEMSPPFTFILAFMTVMGMTIAFAKDISDIEGDAKYGVSTVATKLGARNMTFVVSGVLLLTYVSAILAAIIWPQAFKSNVMLLSHAILAFCLIFQTRELALANYASAPSRQFFEFIWKLHYAEYLVYVFI

SEQ ID NO: 564 - protein, 715 aa, Artificial Sequence
  Synthetic
MSSKAEKRARFDHVFEVIRDELVEYFKAQGMPQDATEWYIKNLNYNVPGGKLNRGLSVVDSVEILKGRALTEDEYFKAAVLGWCVELLQAFFLVSDDVMDSSITRRGQPCWYRNEGVGLVAIWDAFILEAAIYWLLKKHFRADPSYINLVELFHETSFQTEMGQLLDLITAPEDKVDLSKFSLERHRLIVVYKTAFYSFYLPVALAMYLCGISHQAAQDPYALASSILIPLGEYFQVQDDYLDFAGTPEQIGKIGTDIVDNKCSWCVNTALALAAPAQRAVLDASYGRKDAAAEARVKKVFEEVGLHAKYAAYEEDAYRRIVGLIATIPEAGLGADGEVKLQRAVFKSFLDKIYKRQKGGGGSGGGGSGGGGSGGGGSGGGGSGGGGSGGGGSSAGSDQIEGSPHHESDNSIATKILNFGHTCWKLQRPYVVKGMISIACGLFGRELFHNTNLLSWSLMLKAFSSLMVILSFNFFAAIMNQIYDVDIDRINKPDLPLVSGEMSIETAWILSIIVALTGLILTIKLNCGPLFISLYCVSIFAGFAYSVPPIRWKQYPFTNFLITISSHVGVNFTCYYASRAAFGLPFEMSPPFTFILAFMTVMGMTIAFAKDISDIEGDAKYGVSTVATKLGARNMTFVVSGVLLLTYVSAILAAIIWPQAFKSNVMLLSHAILAFCLIFQTRELALANYASAPSRQFFEFIWKLHYAEYLVYVFI

SEQ ID NO: 565 - protein, 706 aa, Artificial Sequence
  Synthetic
MSDNRTKFLNVFPSLVKELRDILAGYGMPEEAIQWYEKSLNYNSVGGKLNRGLSVVDTYALLKGYKSVDELSDEEYKKVAILGWCIELLQAYFLVADDMMDKSITRRGQPCWYKVPNVGEIAIWDAFMLEGAIYCLLKNHFRQEPYYVDILELFHDVTFQTELGQLLDLITAPEDKVDLSKFSLEKHSFIVIFKTAYYSFYLPVALALYAAGITDPRDLKQARDVLIPLGEYFQIQDDYLDCFGKPEDIGKIGTDIQDNKCSWVINIALKKASPEQRKVLDENYGRKDAEKEQKCRAVFNELDIESIYHEYEEKVASELRAKIANIDESRGFKAEVLTLFLNKIYHRKKGGGGSGGGGSGGGGSGGGGSGGGGSGGGGSGGGGSSAGSDQIEGSPHHESDNSIATKILNFGHTCWKLQRPYVVKGMISIACGLFGRELFHNTNLLSWSLMLKAFSSLMVILSFNFFAAIMNQIYDVDIDRINKPDLPLVSGEMSIETAWILSIIVALTGLILTIKLNCGPLFISLYCVSIFAGFAYSVPPIRWKQYPFTNFLITISSHVGVNFTCYYASRAAFGLPFEMSPPFTFILAFMTVMGMTIAFAKDISDIEGDAKYGVSTVATKLGARNMTFVVSGVLLLTYVSAILAAIIWPQAFKSNVMLLSHAILAFCLIFQTRELALANYASAPSRQFFEFIWKLHYAEYLVYVFI

SEQ ID NO: 566 - protein, 715 aa, Artificial Sequence
  Synthetic
MPVTIPLKTSPEVIAAFEKSYHVIAEDLLHDLEHKYKMPAVGVQRMRQMLEHNVMGGKMNRGLAVVDTLMIIAQAQGKTLTEDDIFRAHVAGWAIEWLQACFLVADDIMDQSHTRRGKPCWYRMPGVGLEAVWDALVLEGHIFMFIKKHFRSQPYYADLVDLLHEVAYLTELGQMIDMLTAPEGDVNLSRFSLDRHAYIVVHKTSYYSFYLSVAMAFMLSGITNPAAFDQAKQILLPLGEYFQVQDDYLDAFADPSVLGKIGTDIEDNKCSWLVNTALARCTPEQRTLLDTNYGRKDAKCIEAVKQLYRDMQLDQEFERYEEASYKRIMGMINGIDKGLGVPPEVYVSFMNKIYKRSKGGGGSGGGGSGGGGSGGGGSGGGGSGGGGSGGGGSSAGSDQIEGSPHHESDNSIATKILNFGHTCWKLQRPYVVKGMISIACGLFGRELFHNTNLLSWSLMLKAFSSLMVILSFNFFAAIMNQIYDVDIDRINKPDLPLVSGEMSIETAWILSIIVALTGLILTIKLNCGPLFISLYCVSIFAGFAYSVPPIRWKQYPFTNFLITISSHVGVNFTCYYASRAAFGLPFEMSPPFTFILAFMTVMGMTIAFAKDISDIEGDAKYGVSTVATKLGARNMTFVVSGVLLLTYVSAILAAIIWPQAFKSNVMLLSHAILAFCLIFQTRELALANYASAPSRQFFEFIWKLHYAEYLVYVFI

SEQ ID NO: 567 - protein, 704 aa, Artificial Sequence
  Synthetic
MAKSASLEKFESIFPTLVEDVLAHSKSYGLPQQALDWFKNNLNANAIGGKCNRGMSVPDSVSLMTGKELNEEEYFKAATLGWLTELLQAYFLVSDDIMDSSITRRGVPCWYRQPEVGMIAIWDAFMLESAIYILLKKYFRSHKSYVDLMELFHEVTFQTELGQTCDLLTAPEDKVDLDNFSMEKYTFIVIYKTAYYSFYLPVALALHQLGIATEKNLKQAEAVLIPLGTYFQIQDDYLDNFGDPEHIGKIGTDILDNKCSWLVNKALSIATPEQRKVLEENYGRKNKDNEAVVKKLYNELGLEKLYQEYEEKEVGNIRKLIDETDESEGLKKTVFESFLGKIYKRTKGGGGSGGGGSGGGGSGGGGSGGGGSGGGGSGGGGSSAGSDQIEGSPHHESDNSIATKILNFGHTCWKLQRPYVVKGMISIACGLFGRELFHNTNLLSWSLMLKAFSSLMVILSFNFFAAIMNQIYDVDIDRINKPDLPLVSGEMSIETAWILSIIVALTGLILTIKLNCGPLFISLYCVSIFAGFAYSVPPIRWKQYPFTNFLITISSHVGVNFTCYYASRAAFGLPFEMSPPFTFILAFMTVMGMTIAFAKDISDIEGDAKYGVSTVATKLGARNMTFVVSGVLLLTYVSAILAAIIWPQAFKSNVMLLSHAILAFCLIFQTRELALANYASAPSRQFFEFIWKLHYAEYLVYVFI

SEQ ID NO: 568 - protein, 704 aa, Artificial Sequence
  Synthetic
MAKADALQKYESIFPTLVEDVLAHSKSYGLPQQALDWFKNNLNANAIGGKCNRGMSVPDSVSLMTGKELNEEEYFKAATLGWLTELLQAYWLVSDDIMDSSITRRGVPCWYRQPEVGMIAINDAFMLESAIYILLKKYFRSHKSYVDLMELFHEVTFQTELGQTCDLLTAPETKVDLDNFSMEKYTFIVIYKTAYYSFYLPVALALHQLGIATEKNLKQAEAILIPLGTYFQIQDDYLDNFGDPEHIGKIGTDILDNKCSWLVNKALLIATPEQRKILDENYGRKNKDNEAVVKKLYNELGLEKLYQEYEESEVGKIRKLIDETDESEGLKKSVFESFLGKIYKRTKGGGGSGGGGSGGGGSGGGGSGGGGSGGGGSGGGGSSAGSDQIEGSPHHESDNSIATKILNFGHTCWKLQRPYVVKGMISIACGLFGRELFHNTNLLSWSLMLKAFSSLMVILSFNFFAAIMNQIYDVDIDRINKPDLPLVSGEMSIETAWILSIIVALTGLILTIKLNCGPLFISLYCVSIFAGFAYSVPPIRWKQYPFTNFLITISSHVGVNFTCYYASRAAFGLPFEMSPPFTFILAFMTVMGMTIAFAKDISDIEGDAKYGVSTVATKLGARNMTFVVSGVLLLTYVSAILAAIIWPQAFKSNVMLLSHAILAFCLIFQTRELALANYASAPSRQFFEFIWKLHYAEYLVYVFI

SEQ ID NO: 569 - protein, 704 aa, Artificial Sequence
  Synthetic
MATTTPRADFEKVFPSLVEDLLGEARKYKLPDNALQWFERSLNANTPGGKLNRGMSVPDTGSQLLERPLSPDEFKDLATLGWLTELLQAFFLVSDDIMDASITRRGEPCWYRQEGVGMIAIWDAFMLESGIYLTLKKHFRSHPAYLDLIELFHEVTWQTELGQLCDLITAPEDHVDLNSFSMDKYTFIVIYKTAYYSFYLPVALALHYLRLATPQNLKQAHDILIPLGEYFQIQDDYLDAFGDPSVIGKIGTDIKDNKCGWLINQALQICTPEQRKVLDENYGQKDDAKEAKVKELYDELQLEKRYRAYEEKRVGEIRQLIAAVDESTGLKKGVFEVFLAKIYKRSKGGGGSGGGGSGGGGSGGGGSGGGGSGGGGSGGGGSSAGSDQIEGSPHHESDNSIATKILNFGHTCWKLQRPYVVKGMISIACGLFGRELFHNTNLLSWSLMLKAFSSLMVILSFNFFAAIMNQIYDVDIDRINKPDLPLVSGEMSIETAWILSIIVALTGLILTIKLNCGPLFISLYCVSIFAGFAYSVPPIRWKQYPFTNFLITISSHVGVNFTCYYASRAAFGLPFEMSPPFTFILAFMTVMGMTIAFAKDISDIEGDAKYGVSTVATKLGARNMTFVVSGVLLLTYVSAILAAIIWPQAFKSNVMLLSHAILAFCLIFQTRELALANYASAPSRQFFEFIWKLHYAEYLVYVFI

SEQ ID NO: 570 - protein, 711 aa, Artificial Sequence
  Synthetic
MSKEVAAKNKVKFLAFFPDLVFELEVMLENYGMPADAINWFKRSLNYNTPGGKLNRGISVVDTYVILKGYKSWDELSAEEFKKAAILGWCVELLQAYFLVADDMMDQSITRRGQPCWYKVENVGNIAIWDSFMLEGAIYKILRKYFKKESYYADLLDLLHEVTFQTELGQLLDLITAPEDHVDLSKFTPAKHSFIVIFKTAYYSFYLPVVMAMYLSGITHEKDLQQAEHILIPLGEYFQIQDDYLDCFGKPEDIGKIGTDIQDNKCSWVINQALRLASPEQRQILDENYGRKDADKEAKCKEVFDQLDIAGKYKAYEENIGKELQKRIADTEEDRGFKKEVFQVFFDKIYKRTKGGGGSGGGGSGGGGSGGGGSGGGGSGGGGSGGGGSSAGSDQIEGSPHHESDNSIATKILNFGHTCWKLQRPYVVKGMISIACGLFGRELFHNTNLLSWSLMLKAFSSLMVILSFNFFAAIMNQIYDVDIDRINKPDLPLVSGEMSIETAWILSIIVALTGLILTIKLNCGPLFISLYCVSIFAGFAYSVPPIRWKQYPFTNFLITISSHVGVNFTCYYASRAAFGLPFEMSPPFTFILAFMTVMGMTIAFAKDISDIEGDAKYGVSTVATKLGARNMTFVVSGVLLLTYVSAILAAIIWPQAFKSNVMLLSHAILAFCLIFQTRELALANYASAPSRQFFEFIWKLHYAEYLVYVFI

SEQ ID NO: 571 - protein, 708 aa, Artificial Sequence
  Synthetic
MSKEEKREKFLSVFPKLVEELKSILVGYGMRGDAVQWFENSLNYNTPGGKLNRGLSVVDTYAILTGKGSFKDLSDDEYFKLATLGWCIELLQAYFLVADDMMDKSITRRGQPCWYRIENVGEIAIWDAFMLEAAIYCLLKNHFKKESYYVDLIELFHDVTFQTELGQLLDLITAPEDNVDLSKFSLEKHSFIVRFKTAYYSFYLPVALAMYVAGITDAKDLKQAQDVLIPLGEYFQIQDDYLDCFGKPEDIGKIGTDIQDNKCSWVVNTALKICTPEQRTLLDENYGKKDAESEKKCKQLFYDLKINDMYHEYEEGIAKELKEKIANVDESRGFKGDVLTAFLEKVYKRKKGGGGSGGGGSGGGGSGGGGSGGGGSGGGGSGGGGSSAGSDQIEGSPHHESDNSIATKILNFGHTCWKLQRPYVVKGMISIACGLFGRELFHNTNLLSWSLMLKAFSSLMVILSFNFFAAIMNQIYDVDIDRINKPDLPLVSGEMSIETAWILSIIVALTGLILTIKLNCGPLFISLYCVSIFAGFAYSVPPIRWKQYPFTNFLITISSHVGVNFTCYYASRAAFGLPFEMSPPFTFILAFMTVMGMTIAFAKDISDIEGDAKYGVSTVATKLGARNMTFVVSGVLLLTYVSAILAAIIWPQAFKSNVMLLSHAILAFCLIFQTRELALANYASAPSRQFFEFIWKLHYAEYLVYVFI

SEQ ID NO: 572 - protein, 707 aa, Artificial Sequence
  Synthetic
MTTTSKQQEIDEFIKICYELKEEVLTTMKTKYTMPQEAIDWVNEMIDYNCIGGKLNRGISVIHCAEALTQGKGLTPEARKKAAILGWCIEWLQAFFLVADDVMDDSITRRGQPCWYRIPKVKQIAIWDAFLLESFVYQILKTHFRGESYYLDLVETFQEVIFQTELGQLLDLTSQPLDGPTNLDRFTIERHQKIVVFKTAYYTFYLSAASAMFLSGVSDPACYTLAQEICVKIGEYFQVQDDYLDCYADPEVLGKIGTDIQDNKCSWLVVQALARATPEQRAVIKEHYGKNNEASIAVIKALYVSLDLEGVYRKYENESYDELCKLIGAVNNMPATVFHMLLSKIYKRTMGGGGSGGGGSGGGGSGGGGSGGGGSGGGGSGGGGSSAGSDQIEGSPHHESDNSIATKILNFGHTCWKLQRPYVVKGMISIACGLFGRELFHNTNLLSWSLMLKAFSSLMVILSFNFFAAIMNQIYDVDIDRINKPDLPLVSGEMSIETAWILSIIVALTGLILTIKLNCGPLFISLYCVSIFAGFAYSVPPIRWKQYPFTNFLITISSHVGVNFTCYYASRAAFGLPFEMSPPFTFILAFMTVMGMTIAFAKDISDIEGDAKYGVSTVATKLGARNMTFVVSGVLLLTYVSAILAAIIWPQAFKSNVMLLSHAILAFCLIFQTRELALANYASAPSRQFFEFIWKLHYAEYLVYVFI

SEQ ID NO: 573 - protein, 704 aa, Artificial Sequence
  Synthetic
MAQKTTLKEFEAVYPKLEEALLDHAKSYKLPEKELEWLKKNLEVNPLGGKCNRGMSVPDSASVILGRPLTEDEYFKTATLGWMTELLQAFFLVSDDIMDSSITRRGQPCWYRQEGVGMIAIWDAFILESGIYIILKKFFRDHPRYIELVELFHETSFQTELGQLCDLLTAPEDSVNLDNFSLEKYSFIVIYKTAFYSFYLPVALALYYLDIATPKNLQTAKDILIPLGEYFQIQDDYLDNFGLPEHIGKIGTDIKDNKCSWLVNQALKIVSPEQRKILEDNYGQKDDAKEKVIKQLYDDLKLKELYEEFEEKRAGELKDMINKIDESEGLKKQVFEVFLGKIYKRSKGGGGSGGGGSGGGGSGGGGSGGGGSGGGGSGGGGSSAGSDQIEGSPHHESDNSIATKILNFGHTCWKLQRPYVVKGMISIACGLFGRELFHNTNLLSWSLMLKAFSSLMVILSFNFFAAIMNQIYDVDIDRINKPDLPLVSGEMSIETAWILSIIVALTGLILTIKLNCGPLFISLYCVSIFAGFAYSVPPIRWKQYPFTNFLITISSHVGVNFTCYYASRAAFGLPFEMSPPFTFILAFMTVMGMTIAFAKDISDIEGDAKYGVSTVATKLGARNMTFVVSGVLLLTYVSAILAAIIWPQAFKSNVMLLSHAILAFCLIFQTRELALANYASAPSRQFFEFIWKLHYAEYLVYVFI

SEQ ID NO: 574 - protein, 707 aa, Artificial Sequence
  Synthetic
MDKQAAKDKFIGEFDALVDELKQILHHYKMPQEAVDWFTKNLYYNAPGGKLNRGLSVIDTYCILKNVKIEELSDAEYKKVAILGWAIELLQAYFLVADDMMDQSKTRRGQPCWYLKPGVGNIAIWDSFMLEGAIYVLLKKHFRQDPYYVDLLDLFHEVTFQTELGQLLDLVTADEEHVDLDKFSLQKHSFIVIFKTAYYSFYLPVALAMFMSGVSSQKDLEQVKNVLIPLGEYFQIQDDYLDCFGTPEQIGKIGTDIKDNKCSWVVNQALLKVNAEQRKLLDENYGKKDDESEARVKKLFHDLDIPKIYNEYEEDVVSRLRAQIENIDESRGLKKEVLTSFLNKVYKRSKGGGGSGGGGSGGGGSGGGGSGGGGSGGGGSGGGGSSAGSDQIEGSPHHESDNSIATKILNFGHTCWKLQRPYVVKGMISIACGLFGRELFHNTNLLSWSLMLKAFSSLMVILSFNFFAAIMNQIYDVDIDRINKPDLPLVSGEMSIETAWILSIIVALTGLILTIKLNCGPLFISLYCVSIFAGFAYSVPPIRWKQYPFTNFLITISSHVGVNFTCYYASRAAFGLPFEMSPPFTFILAFMTVMGMTIAFAKDISDIEGDAKYGVSTVATKLGARNMTFVVSGVLLLTYVSAILAAIIWPQAFKSNVMLLSHAILAFCLIFQTRELALANYASAPSRQFFEFIWKLHYAEYLVYVFI

SEQ ID NO: 575 - protein, 704 aa, Artificial Sequence
  Synthetic
MGKTTLKEFEAVFPLLVDELMGVLEQYKIPAEAAAWYRRNLEQNTLGGKCNRGMSVVDTYSILTGQDKLSDTEYLRTAILGWCTELLQAFFLVADDIMDSSKTRRGSPCWYLFDGVGNIAIWDSFMLESAVFILIKKHFRKESYYIDLVELFQETIFQTELGQLLDLITAPEDRVDLSKFSLAKHSFIVIFKTAYYSFYLPVALAMYMAGIATESNLKQARDVLIPLGEYFQIQDDYLDCYGDPEHIGKIGTDIKDNKCGWLINKALAIATPEQRDILDKNYGRKDDEAEARIKQVYIELELEKCYQEYEEQAVGKIRGLIDQVDESNGLKKEVLTSFLNKIYKRSKGGGGSGGGGSGGGGSGGGGSGGGGSGGGGSGGGGSSAGSDQIEGSPHHESDNSIATKILNFGHTCWKLQRPYVVKGMISIACGLFGRELFHNTNLLSWSLMLKAFSSLMVILSFNFFAAIMNQIYDVDIDRINKPDLPLVSGEMSIETAWILSIIVALTGLILTIKLNCGPLFISLYCVSIFAGFAYSVPPIRWKQYPFTNFLITISSHVGVNFTCYYASRAAFGLPFEMSPPFTFILAFMTVMGMTIAFAKDISDIEGDAKYGVSTVATKLGARNMTFVVSGVLLLTYVSAILAAIIWPQAFKSNVMLLSHAILAFCLIFQTRELALANYASAPSRQFFEFIWKLHYAEYLVYVFI

SEQ ID NO: 576 - protein, 708 aa, Artificial Sequence
  Synthetic
MSKEGNREKFLEEFPELVHELKTILQNYGMPQDAIQWYESSLFFNTPGGKLNRGLSVVDTYVILKGYKSFSDMAKEEYKKVAILGWCIELLQAYFLVADDMMDKSITRRGQPCWYRVKGVGEIAIWDAFMLEAAIYILLKNHFRSESYYVDLIELFHDVTFQTELGQLLDLITAPEDKVDLNKFSMNKQSFIVRFKTAYYSFYLPVALAMYMAGINSDTDLQQAQDVLIPLGEYFQIQDDFLDCFGTPEQIGKIGTDIQDNKCSWVINKALELVTPEQRKVLDENYGQKNQECEDKCREVFNSLNLPKYYEQYEENIAKELREKISQIDESRGFKGEVLTVFLNKIYKRTKGGGGSGGGGSGGGGSGGGGSGGGGSGGGGSGGGGSSAGSDQIEGSPHHESDNSIATKILNFGHTCWKLQRPYVVKGMISIACGLFGRELFHNTNLLSWSLMLKAFSSLMVILSFNFFAAIMNQIYDVDIDRINKPDLPLVSGEMSIETAWILSIIVALTGLILTIKLNCGPLFISLYCVSIFAGFAYSVPPIRWKQYPFTNFLITISSHVGVNFTCYYASRAAFGLPFEMSPPFTFILAFMTVMGMTIAFAKDISDIEGDAKYGVSTVATKLGARNMTFVVSGVLLLTYVSAILAAIIWPQAFKSNVMLLSHAILAFCLIFQTRELALANYASAPSRQFFEFIWKLHYAEYLVYVFI

SEQ ID NO: 577 - protein, 708 aa, Artificial Sequence
  Synthetic
MSKAESKSKFLAVFPKIVNELQSILKSYNMSQEAIDWFTNNLNYNTPGGKLNRGLSVVDTYVILKNYTSINDLSTEEYEKVAILGWCIELLQAYFLVADDMMDSSITRRGQPCWYRVENVNQIAIWDSFMLEASIYVLLKNHFRNDPYYVDLIELFHDITFKTELGQLLDLITAPEDNVNLSNFSLDKHSFIVIYKTAYYSFYLPVALAMYMANVSNEIDLKQAHDILIPLGEYFQIQDDFLDCFGKPEDIGKIGTDIQDNKCSWIINTALTLADKEQKQLLDNNYGQKDAAKEKICKDIFQNLKIDQIYHDYEEKIVNELKQKISKVDQSRGFKSEVLSVFLNKIYKRKKGGGGSGGGGSGGGGSGGGGSGGGGSGGGGSGGGGSSAGSDQIEGSPHHESDNSIATKILNFGHTCWKLQRPYVVKGMISIACGLFGRELFHNTNLLSWSLMLKAFSSLMVILSFNFFAAIMNQIYDVDIDRINKPDLPLVSGEMSIETAWILSIIVALTGLILTIKLNCGPLFISLYCVSIFAGFAYSVPPIRWKQYPFTNFLITISSHVGVNFTCYYASRAAFGLPFEMSPPFTFILAFMTVMGMTIAFAKDISDIEGDAKYGVSTVATKLGARNMTFVVSGVLLLTYVSAILAAIIWPQAFKSNVMLLSHAILAFCLIFQTRELALANYASAPSRQFFEFIWKLHYAEYLVYVFI

SEQ ID NO: 578 - protein, 708 aa, Artificial Sequence
  Synthetic
MTKEDNRKKFLDQFPSLVAQLTEALKTYGIPQDAIDWYEKSLMYNTPGGKLNRGLSVVDTYVILKGLNSPFDMPDEEYSKVALLGWCVELLQAYFLVADDMMDKSITRRGQPCWYRIDEVGDMAIWDAFMLEAAIYCLLKRNFRNESYYVDLLELLHDVTFQTEVGQLLDLMTAPEMLIDLSKFSLERHSYIVIFKTAYYSFYLPVALAMHISGVNDERDLQQAKDVLLPLGEYFQIQDDYLDCFGKPEDIGKIGTDIQDNKCSWVINAALKLCSPEQRKILDDNYGRKSDICEQKCKQVFADLNLEKVYENYEEQVAAKLRDRIEMTDESRGFKREVLYSFLDKIYKRKKGGGGSGGGGSGGGGSGGGGSGGGGSGGGGSGGGGSSAGSDQIEGSPHHESDNSIATKILNFGHTCWKLQRPYVVKGMISIACGLFGRELFHNTNLLSWSLMLKAFSSLMVILSFNFFAAIMNQIYDVDIDRINKPDLPLVSGEMSIETAWILSIIVALTGLILTIKLNCGPLFISLYCVSIFAGFAYSVPPIRWKQYPFTNFLITISSHVGVNFTCYYASRAAFGLPFEMSPPFTFILAFMTVMGMTIAFAKDISDIEGDAKYGVSTVATKLGARNMTFVVSGVLLLTYVSAILAAIIWPQAFKSNVMLLSHAILAFCLIFQTRELALANYASAPSRQFFEFIWKLHYAEYLVYVFI

SEQ ID NO: 579 - protein, 707 aa, Artificial Sequence
  Synthetic
MDKQAAKDRFIKEFDQLVKELQEILTNYKMPQEAIDWFTKSLDYNTPGGKLNRGLSVIDTYAILKGTTSDKLGDEEYKKAALLGWCIELLQAYFLVADDMMDASKTRRGQPCWYLVEGVGNIAIWDSFMLEGAIYILLKKHFRQDKYYVDLLDLFHEVTFQTELGQLLDLVTADEEHVDLDKFSLEKHSFIVTFKTAYYSFYLPVALSMFMVGVSSEEDLKQARDILIPLGEYFQIQDDFLDCFGTPEQIGKIGTDIKDNKCSWVVNKALNKVNQAQRKLLDENYGKKDDESEQRVKDLFKELEIEKDYYQYEESIVSELKQKIDQVDESRGFKKEVLTSFLGKVYKRSKGGGGSGGGGSGGGGSGGGGSGGGGSGGGGSGGGGSSAGSDQIEGSPHHESDNSIATKILNFGHTCWKLQRPYVVKGMISIACGLFGRELFHNTNLLSWSLMLKAFSSLMVILSFNFFAAIMNQIYDVDIDRINKPDLPLVSGEMSIETAWILSIIVALTGLILTIKLNCGPLFISLYCVSIFAGFAYSVPPIRWKQYPFTNFLITISSHVGVNFTCYYASRAAFGLPFEMSPPFTFILAFMTVMGMTIAFAKDISDIEGDAKYGVSTVATKLGARNMTFVVSGVLLLTYVSAILAAIIWPQAFKSNVMLLSHAILAFCLIFQTRELALANYASAPSRQFFEFIWKLHYAEYLVYVFI

SEQ ID NO: 580 - protein, 711 aa, Artificial Sequence
  Synthetic
MVAATNSLSKEDKRAKFEAVFPILVDEIVDYLTSVNVPQDAKDWFKKSLYHNTLGGKYNRGLSVIDTYEILSGKALDDNSYFRAALLGWCIELLQAFFLVADDMMDESKTRRGQPCWYLMPNVGSIAIWDSFMLESAIYFLLKKHFRHETYYVDLLDLFHEVTFQTTLGQELDLLTAPENHVDLSKFSQDKHAFIVIFKTAYYSFYLPVALAMCMANVATPDNLQRASDVLIPLGKYFQIQDDYLDCYGDPSVTGKVGTDILDNKCSWLINVALAKASPEQRKVLDENYGRKDADCEKRVKAVFEELNLKKAYEEYEESEVSTIKQRISVLDESAGLKKEAFTTFLNKIYKRSKGGGGSGGGGSGGGGSGGGGSGGGGSGGGGSGGGGSSAGSDQIEGSPHHESDNSIATKILNFGHTCWKLQRPYVVKGMISIACGLFGRELFHNTNLLSWSLMLKAFSSLMVILSFNFFAAIMNQIYDVDIDRINKPDLPLVSGEMSIETAWILSIIVALTGLILTIKLNCGPLFISLYCVSIFAGFAYSVPPIRWKQYPFTNFLITISSHVGVNFTCYYASRAAFGLPFEMSPPFTFILAFMTVMGMTIAFAKDISDIEGDAKYGVSTVATKLGARNMTFVVSGVLLLTYVSAILAAIIWPQAFKSNVMLLSHAILAFCLIFQTRELALANYASAPSRQFFEFIWKLHYAEYLVYVFI

SEQ ID NO: 581 - protein, 707 aa, Artificial Sequence
  Synthetic
MDKAAIRKKFTDEFDGLVDELKEMLVLYNMPAEAIEWFQKNLDYNTPGGKLNRGLSVIDTYCILKGKKLEDLSAAEYKKVAILGWCIELLQAYFLVADDMMDQSKTRRGQPCWYLVEGVGNIAIWDSFMLEGAIYMLLKKHFRQDSYYVDLLDLFHEVTFQTELGQLLDLVTADEEHVDLDKFSLAKHSFIVIFKTAYYSFYLPVALAMFMCGINSDADLKQVRDVLIPLGEYFQIQDDFLDCFGTPEQIGKIGTDIKDNKCSWVVNQALLKATPEQRKVLDENYGKKDDESEQRVKDLFNEMKIADIYNEYEEAIGAKLKEQIDKVDESRGLKKEVLTAFLAKVYKRSKGGGGSGGGGSGGGGSGGGGSGGGGSGGGGSGGGGSSAGSDQIEGSPHHESDNSIATKILNFGHTCWKLQRPYVVKGMISIACGLFGRELFHNTNLLSWSLMLKAFSSLMVILSFNFFAAIMNQIYDVDIDRINKPDLPLVSGEMSIETAWILSIIVALTGLILTIKLNCGPLFISLYCVSIFAGFAYSVPPIRWKQYPFTNFLITISSHVGVNFTCYYASRAAFGLPFEMSPPFTFILAFMTVMGMTIAFAKDISDIEGDAKYGVSTVATKLGARNMTFVVSGVLLLTYVSAILAAIIWPQAFKSNVMLLSHAILAFCLIFQTRELALANYASAPSRQFFEFIWKLHYAEYLVYVFI

SEQ ID NO: 582 - protein, 707 aa, Artificial Sequence
  Synthetic
MDKAAAKERFINEFDQLVEELKAILIGYKMPQDAIDWFVGNLNYNTPGGKLNRGLSVIDTYCILNNTTANDLSSEEYSKVALLGWCIELLQAYFLVADDMMDHSKTRRGQPCWYLNEGVGNIAIWDSFMLEGALYILLKKHFRNEKYYVDLLDLFHEVTFQTELGQLIDLITADEEIVDLDKFSLSKHSFIVIYKTAYYSFYLPVALAMFMSGINSEQDLKQVRDILIPLGEYFQIQDDFLDCFGTPEQIGKIGTDIKDNKCSWVVNQALLHANEEQRKLLDENYGKKDDESEKRCKQLFKDLNIEKIYFDYEEDTGAKLRKQIEQIDESRGLKKEVLTSFLNKVYKRSKGGGGSGGGGSGGGGSGGGGSGGGGSGGGGSGGGGSSAGSDQIEGSPHHESDNSIATKILNFGHTCWKLQRPYVVKGMISIACGLFGRELFHNTNLLSWSLMLKAFSSLMVILSFNFFAAIMNQIYDVDIDRINKPDLPLVSGEMSIETAWILSIIVALTGLILTIKLNCGPLFISLYCVSIFAGFAYSVPPIRWKQYPFTNFLITISSHVGVNFTCYYASRAAFGLPFEMSPPFTFILAFMTVMGMTIAFAKDISDIEGDAKYGVSTVATKLGARNMTFVVSGVLLLTYVSAILAAIIWPQAFKSNVMLLSHAILAFCLIFQTRELALANYASAPSRQFFEFIWKLHYAEYLVYVFI

SEQ ID NO: 583 - DNA, 2130 bp, Artificial Sequence
  Synthetic
atggccagtgagaaagaaataagacgtgaaagattcttaaatgtttttccaaagcttgtcgaagaactaaacgcatctctgttggcttatggtatgcctaaggaagcttgcgactggtacgctcattccttgaactacaatacaccaggcggtaaattgaacagaggattatcagtagtcgatacctatgccatcttgtctaacaagacggttgaacagttgggtcaagaagagtacgaaaaggtggctattttgggttggtgtattgagcttttacaagcttacttcttggttgctgatgacatgatggataaatcaatcactagaaggggtcaaccatgttggtacaaggttcctgaagtaggtgaaattgccatcaacgacgcctttatgttggaagctgcaatttataagctactaaagtcgcacttcagaaatgaaaaatactatatcgatattaccgagttgttccacgaagtcacttttcaaactgaacttggtcaattaatggacttgataaccgctccagaagacaaggttgatctatctaagttttccttgaagaagcattctttcattgtcactttcaagacagcttactattccttttacttacccgttgccctggctatgtatgtcgccggcatcaccgatgaaaaagacttgaaacaagctcgtgatgttttgattccattgggtgagtacttccagatccaagacgattacttagactgtttcggtactccagaacaaatcggtaagatcggtacagacattcaagataacaagtgcagctgggttattaataaagctcttgaattggcttccgccgaacagaggaagactttggacgaaaactatggtaagaaggattctgtagctgaagctaaatgtaagaaaatcttcaatgatctaaaaattgagcaattgtaccacgaatacgaagaatctatcgccaaggatcttaaggcaaaaatttctcaagtcgacgagagtagaggctttaaggctgatgtgttaaccgcattcttgaacaaggtgtacaaaagatccaagggcggaggtggttctggtgggggtggttcgggtggtggtgggtcaggtggtggcggtagcggtggcggtggttccggtggtggtggtagtggaggtgggggttcttcagccgggagcgaccagatagaaggaagtcctcatcacgagtctgataactccattgcgacaaaaatcctgaatttcggtcatacgtgctggaagttacaaaggccctatgtcgtgaaaggtatgatttcgatagcttgtggcttgtttggtcgcgaactatttcataataccaaccttttatcttggtcattgatgctcaaggcattctcatccttaatggtaatcctttcttttaatttctttgctgccataatgaatcaaatttacgatgttgatattgaccgaattaacaaaccagatttgccactcgttagtggagagatgagtatcgaaactgcatggatactatcgatcattgtcgctctgacaggcttaatattgactattaagcttaattgtggtccgctatttatatcattgtattgcgtatctattttcgctggatttgcatacagcgttcctccaattcgttggaaacagtatcctttcaccaacttcttaataactatcagctcacacgtgggtgttaactttacatgttattacgcctccagagcagcctttggcttacccttcgaaatgtctccgccatttacttttattctcgcttttatgaccgtaatgggaatgacaatagctttcgcgaaagacatttcagatatcgaaggtgatgcgaaatatggggtgtctactgttgctacgaagttaggtgcaagaaatatgacgtttgttgtcagtggtgtcttgttgctgacatacgtaagcgctatacttgcagctatcatttggccgcaagcctttaagtcaaatgtgatgttgttatctcatgccatcctggcgttctgcctaattttccaaactagagagctagcgcttgcaaattatgcttctgcacctagtaggcagttttttgaatttatctggaaattgcattatgcagagtacttagtttatgttttcatctaa

SEQ ID NO: 584 - DNA, 2130 bp, Artificial Sequence
  Synthetic
atggccagtgagaaagaaataagacgtgaaagattcttaaatgtttttccaaagcttgtcgaagaactaaacgcatctctgttggcttatggtatgcctaaggaagcttgcgactggtacgctcattccttgaactacaatacaccaggcggtaaattgaacagaggattatcagtagtcgatacctatgccatcttgtctaacaagacggttgaacagttgggtcaagaagagtacgaaaaggtggctattttgggttggtgtattgagcttttacaagcttactggttggttgctgatgacatgatggataaatcaatcactagaaggggtcaaccatgttggtacaaggttcctgaagtaggtgaaattgccatctgggacgcctttatgttggaagctgcaatttataagctactaaagtcgcacttcagaaatgaaaaatactatatcgatattaccgagttgttccacgaagtcacttttcaaactgaacttggtcaattaatggacttgataaccgctccagaagacaaggttgatctatctaagttttccttgaagaagcattctttcattgtcactttcaagacagcttactattccttttacttacccgttgccctggctatgtatgtcgccggcatcaccgatgaaaaagacttgaaacaagctcgtgatgttttgattccattgggtgagtacttccagatccaagacgattacttagactgtttcggtactccagaacaaatcggtaagatcggtacagacattcaagataacaagtgcagctgggttattaataaagctcttgaattggcttccgccgaacagaggaagactttggacgaaaactatggtaagaaggattctgtagctgaagctaaatgtaagaaaatcttcaatgatctaaaaattgagcaattgtaccacgaatacgaagaatctatcgccaaggatcttaaggcaaaaatttctcaagtcgacgagagtagaggctttaaggctgatgtgttaaccgcattcttgaacaaggtgtacaaaagatccaagggcggaggtggttctggtgggggtggttcgggtggtggtgggtcaggtggtggcggtagcggtggcggtggttccggtggtggtggtagtggaggtgggggttcttcagccgggagcgaccagatagaaggaagtcctcatcacgagtctgataactccattgcgacaaaaatcctgaatttcggtcatacgtgctggaagttacaaaggccctatgtcgtgaaaggtatgatttcgatagcttgtggcttgtttggtcgcgaactatttcataataccaaccttttatcttggtcattgatgctcaaggcattctcatccttaatggtaatcctttcttttaatttctttgctgccataatgaatcaaatttacgatgttgatattgaccgaattaacaaaccagatttgccactcgttagtggagagatgagtatcgaaactgcatggatactatcgatcattgtcgctctgacaggcttaatattgactattaagcttaattgtggtccgctatttatatcattgtattgcgtatctattttcgctggatttgcatacagcgttcctccaattcgttggaaacagtatcctttcaccaacttcttaataactatcagctcacacgtgggtgttaactttacatgttattacgcctccagagcagcctttggcttacccttcgaaatgtctccgccatttacttttattctcgcttttatgaccgtaatgggaatgacaatagctttcgcgaaagacatttcagatatcgaaggtgatgcgaaatatggggtgtctactgttgctacgaagttaggtgcaagaaatatgacgtttgttgtcagtggtgtcttgttgctgacatacgtaagcgctatacttgcagctatcatttggccgcaagcctttaagtcaaatgtgatgttgttatctcatgccatcctggcgttctgcctaattttccaaactagagagctagcgcttgcaaattatgcttctgcacctagtaggcagttttttgaatttatctggaaattgcattatgcagagtacttagtttatgttttcatctaa

SEQ ID NO: 585 - DNA, 2112 bp, Artificial Sequence
  Synthetic
atgcctgcaacagaccgtgctgcctttcaggaaatcttcccatccttagctgaggatattctagcttatgccaaggaatctaacctgccccaaaatgctttgcaatggttcgaaaaagctttgaacgtaaatgttccaggcggtaagcttaacagaggtttatcatgtccagatacgggtttggcattgcttgaaaaacctttgaccgaagaacaatttaagcatttaagcatattgggttggttgaccgagttgttgcaagctttcttcttagtctctgacgatattatggacggtagtatcactaggagaggacaaccatgctggtacagacacgaaggtgttggtttgattgccatctgggatgcttttctgctggaatcctctatttacattatactaaagaagcacttcagatctcatccagcatatgctgactttatcgatttgttccacgaaactacctggcaaactgaattaggccagctatgtgacttgattactgctcctgaggataaagtggacctaaacaatttcagcatggaaaagtacatgttcatagttacatacaagaccgcctactattccttttatttgccagtagctttggctcttttgtacttacaaagagctactccatcgaacttgagacaagcacatgacatccttatcccattgggtcaatactttcaagttcaagatgactatttagatgcttacggtaacccagatgtcattggtaaaatcggtaccgatattaaggacaacaagtgtagttggttggtcaatcaggcactacaaagatgtaatgccgaacaacgtaaagttctggacgaagcttacggtagaaaggacgatgctttggaagccaaagtgaaggctttgtacaaagaattagatttggaaaaggtttatcaggagtacgaagaaaagattgtcggagaattaaaggaaaagatcgccgctgttgatgaatccgagggtttgaagaaggatgtcttcaacgccttcttaggtaagatttacaaaaggtcaaagggcggaggtggttctggtgggggtggttcgggtggtggtgggtcaggtggtggcggtagcggtggcggtggttccggtggtggtggtagtggaggtgggggttcttcagccgggagcgaccagatagaaggaagtcctcatcacgagtctgataactccattgcgacaaaaatcctgaatttcggtcatacgtgctggaagttacaaaggccctatgtcgtgaaaggtatgatttcgatagcttgtggcttgtttggtcgcgaactatttcataataccaaccttttatcttggtcattgatgctcaaggcattctcatccttaatggtaatcctttcttttaatttctttgctgccataatgaatcaaatttacgatgttgatattgaccgaattaacaaaccagatttgccactcgttagtggagagatgagtatcgaaactgcatggatactatcgatcattgtcgctctgacaggcttaatattgactattaagcttaattgtggtccgctatttatatcattgtattgcgtatctattttcgctggatttgcatacagcgttcctccaattcgttggaaacagtatcctttcaccaacttcttaataactatcagctcacacgtgggtgttaactttacatgttattacgcctccagagcagcctttggcttacccttcgaaatgtctccgccatttacttttattctcgcttttatgaccgtaatgggaatgacaatagctttcgcgaaagacatttcagatatcgaaggtgatgcgaaatatggggtgtctactgttgctacgaagttaggtgcaagaaatatgacgtttgttgtcagtggtgtcttgttgctgacatacgtaagcgctatacttgcagctatcatttggccgcaagcctttaagtcaaatgtgatgttgttatctcatgccatcctggcgttctgcctaattttccaaactagagagctagcgcttgcaaattatgcttctgcacctagtaggcagttttttgaatttatctggaaattgcattatgcagagtacttagtttatgttttcatctaa

SEQ ID NO: 586 - DNA, 2280 bp, Artificial Sequence
  Synthetic
atgtcagataaggctgcacgtagagccaggtttgaaggtgcttggaacgagatcagagatgaaattctagcttacttccagggagaacatatgcctcccgaagccgttgaatggtataaaaataacttggactacaatgtaccaggtggtaagcttaacagaggtatgtccgtctgtgacactgttcaaatactgaaaggcagagaattgacggacgaggaatataagagagctgctgtgttaggttggtgcgtcgaattgttacaaggtttctggttggttagcgatgatatcatggacgccagtattaccagaaggggtcaaccatgttggtaccgtgttccaaaggtcggtatgctagctattaatgattcttttatgttggaagctccaatctactggttgattaaaaagtatttcagaagagaatctttttacgccgacttggttgacttattccacgaaacaacctaccaaactgagatgggtcaacttgttgatctgatcactgcacctgaagatgtcgtcgacttgtcgaagttctctttggagagacacagattgattgtggtatacaaaaccgcttattactctttttatttaccagttgcttgtgcaatgatgatctgtggtatcccattcccagaaaaggaaccacgtttcgactttcttaacggcggttttggtggtgcccccttggatcctactgctgatccttacactaccgccctatccattttaataccattgggagaatacttccaagttcaggacgactacttggactattcggctccaccagaagttttgggtaagataggtacagatattattgataacaaatgctcctgggtcgttaacgctgctttagttttaacagctccagctcattctcccagtgcctcagcttctactccattcgcaccaaccgcctccggttctttggctacatccaatctatccgaggaaagaaaggccgaattgagaaaaatcttagatgataattacggtaagaagtcaaaggaaaacgaggaaaaagtcaaggaagtttaccgtgaattggacattgccgctcactataagagatacgaagaaggtgtcgttggcgaagtaagacgtagaatcgcatctgttgatgaagccaagaccggattaaaaagagatgtgtttactagcttcttggaaaagatttatggtagaagtaagggcggaggtggttctggtgggggtggttcgggtggtggtgggtcaggtggtggcggtagcggtggcggtggttccggtggtggtggtagtggaggtgggggttcttcagccgggagcgaccagatagaaggaagtcctcatcacgagtctgataactccattgcgacaaaaatcctgaatttcggtcatacgtgctggaagttacaaaggccctatgtcgtgaaaggtatgatttcgatagcttgtggcttgtttggtcgcgaactatttcataataccaaccttttatcttggtcattgatgctcaaggcattctcatccttaatggtaatcctttcttttaatttctttgctgccataatgaatcaaatttacgatgttgatattgaccgaattaacaaaccagatttgccactcgttagtggagagatgagtatcgaaactgcatggatactatcgatcattgtcgctctgacaggcttaatattgactattaagcttaattgtggtccgctatttatatcattgtattgcgtatctattttcgctggatttgcatacagcgttcctccaattcgttggaaacagtatcctttcaccaacttcttaataactatcagctcacacgtgggtgttaactttacatgttattacgcctccagagcagcctttggcttacccttcgaaatgtctccgccatttacttttattctcgcttttatgaccgtaatgggaatgacaatagctttcgcgaaagacatttcagatatcgaaggtgatgcgaaatatggggtgtctactgttgctacgaagttaggtgcaagaaatatgacgtttgttgtcagtggtgtcttgttgctgacatacgtaagcgctatacttgcagctatcatttggccgcaagcctttaagtcaaatgtgatgttgttatctcatgccatcctggcgttctgcctaattttccaaactagagagctagcgcttgcaaattatgcttctgcacctagtaggcagttttttgaatttatctggaaattgcattatgcagagtacttagtttatgttttcatctaa

SEQ ID NO: 587 - DNA, 2115 bp, Artificial Sequence
  Synthetic
atgggtaaaactacacttaaggagttcgaagctgtgtttcctctactggttgatgaaataatggccgtcttagaaggatataagatctcttcagaagcagctgcttggtaccgtaaggtattggaacataacaccgttggtggtaaatgtaataggggcatgtcggttgtcgacacgtacagcactttgaccaaccaagataagttgtctgacgaagattacttgagatccgccattttaggttggtgcactgagttgttacaggctttctggttggtcagtgacgacattatggatggttctaagaccagaagaggttctccctgttggtatctacacgaaggtgtgggtaatatcgctattaacgacgctttcatgttggaatccgccatctacatcttgctgaaaaagcactttagaaacactccatactatatagatctaattgagttgttccatgatgttagctttcaaacagaattaggccaattgcttgacttgatcactgctccagaagacagagttgatctttccaaattctctttagaaaagcacagttttattgtcatcttcaagaccgcctattactcattctacctaccagtagcattggctatgtacatggctggtgttgcaactccagaaaatttgaagcaagctcacgatgtcttgattcctctgggtgagtacttccaaatccaggacgactatttggattgttacggtgatcccgaacatataggtaagattggaacggatattaaagacaacaagtgcggttggctgatcaaccaagccttagctattgctaccccagaacaaagacaagttttagacgataattatggtaaaaaggatgacgttgccgaagctagggtcaagaaagtatttttggacttagaattggagaaacgttaccaagattacgaagaaacagttgtaggtaagataagaaccttaatcgaaggtattgatgagactactggttttaagaaggatgttctgactaacttcctgaataagatttacaagagatctaagggcggaggtggttctggtgggggtggttcgggtggtggtgggtcaggtggtggcggtagcggtggcggtggttccggtggtggtggtagtggaggtgggggttcttcagccgggagcgaccagatagaaggaagtcctcatcacgagtctgataactccattgcgacaaaaatcctgaatttcggtcatacgtgctggaagttacaaaggccctatgtcgtgaaaggtatgatttcgatagcttgtggcttgtttggtcgcgaactatttcataataccaaccttttatcttggtcattgatgctcaaggcattctcatccttaatggtaatcctttcttttaatttctttgctgccataatgaatcaaatttacgatgttgatattgaccgaattaacaaaccagatttgccactcgttagtggagagatgagtatcgaaactgcatggatactatcgatcattgtcgctctgacaggcttaatattgactattaagcttaattgtggtccgctatttatatcattgtattgcgtatctattttcgctggatttgcatacagcgttcctccaattcgttggaaacagtatcctttcaccaacttcttaataactatcagctcacacgtgggtgttaactttacatgttattacgcctccagagcagcctttggcttacccttcgaaatgtctccgccatttacttttattctcgcttttatgaccgtaatgggaatgacaatagctttcgcgaaagacatttcagatatcgaaggtgatgcgaaatatggggtgtctactgttgctacgaagttaggtgcaagaaatatgacgtttgttgtcagtggtgtcttgttgctgacatacgtaagcgctatacttgcagctatcatttggccgcaagcctttaagtcaaatgtgatgttgttatctcatgccatcctggcgttctgcctaattttccaaactagagagctagcgcttgcaaattatgcttctgcacctagtaggcagttttttgaatttatctggaaattgcattatgcagagtacttagtttatgttttcatctaa

SEQ ID NO: 588 - DNA, 2130 bp, Artificial Sequence
  Synthetic
atggtcgccgttaaactacagaaggaggaaaacagacaagcatttttaaaggtattcccaaccctggctgacgaagttcttgctgaattgaggaagtataatatgcctgaagatgcttacgaatggactaaaaagatgttgtactacaacgtcccaggaggtaagttgaatagaggtatatccgtggttgatacagttcgtattttgaagggtgactcagtcactgaggacgatatcttcaaagccaccgttttaggttggttgattgaatttcttcaagctttcttcttggtttctgatgacatcatggatgcttctattacgagaagaggccaaccctgttggtataagagtgaaggtgtcggtatggttgccatctgggacgcttttatattagaatcgtgcatttacatcttcttgaagaaatacttcaaaaagactaactattacattgagttagtggaactatttcacgaagtcacctttcaaactgaattgggtcaactgtgtgatttgataactgcaccagaagatcatgtagacttgtctaagttctccatcaagaaacaccagttcattgttatctataagaccgcctactactctttctatttgccagtcgctttggctatgcatatggttggcgtcaagaacgaagaagcttttaagcaagcccacgacatcttgattcctttaggtgaatacttccaagtacaagatgactacttagattgttatggtgctccagaagtaattggtaaaattggaactgacataatggacaacaagtgtagctggctgatcaatcaagctctagctaaggcttccccagaacaaagaaagacattggatgaaaattatggtaaaaagaacgccgactcagaggcaaaagttaagcaaatttacatcgatttggatattgagggtacctacaaagcttacgaagaaaagtcttttaacgatcttaatgccctaattgatcaattggacgaatccgctggccttaaaaagatggttttcactgaatttatggataagatctacaaaagaacaaaaggcggaggtggttctggtgggggtggttcgggtggtggtgggtcaggtggtggcggtagcggtggcggtggttccggtggtggtggtagtggaggtgggggttcttcagccgggagcgaccagatagaaggaagtcctcatcacgagtctgataactccattgcgacaaaaatcctgaatttcggtcatacgtgctggaagttacaaaggccctatgtcgtgaaaggtatgatttcgatagcttgtggcttgtttggtcgcgaactatttcataataccaaccttttatcttggtcattgatgctcaaggcattctcatccttaatggtaatcctttcttttaatttctttgctgccataatgaatcaaatttacgatgttgatattgaccgaattaacaaaccagatttgccactcgttagtggagagatgagtatcgaaactgcatggatactatcgatcattgtcgctctgacaggcttaatattgactattaagcttaattgtggtccgctatttatatcattgtattgcgtatctattttcgctggatttgcatacagcgttcctccaattcgttggaaacagtatcctttcaccaacttcttaataactatcagctcacacgtgggtgttaactttacatgttattacgcctccagagcagcctttggcttacccttcgaaatgtctccgccatttacttttattctcgcttttatgaccgtaatgggaatgacaatagctttcgcgaaagacatttcagatatcgaaggtgatgcgaaatatggggtgtctactgttgctacgaagttaggtgcaagaaatatgacgtttgttgtcagtggtgtcttgttgctgacatacgtaagcgctatacttgcagctatcatttggccgcaagcctttaagtcaaatgtgatgttgttatctcatgccatcctggcgttctgcctaattttccaaactagagagctagcgcttgcaaattatgcttctgcacctagtaggcagttttttgaatttatctggaaattgcattatgcagagtacttagtttatgttttcatctaa

SEQ ID NO: 589 - DNA, 2109 bp, Artificial Sequence
  Synthetic
atgtcctcaccaagagcagcttttgaggctgttttccccagtttggcccaagatatcctagaccatgctaaaaagtacaacttacctcagaatgcccttgaatggttagaaaagaacctgaatacaaacgtgccaggaggcaaattgaacaggggtttgtctgtcccagataccggtgtagctttgttgaagaagccactttcggaagaacaatataaagacttggctactttgggttggatgacggagttattgcaagctttctttttggtcagcgatgacttaatggacggttctataacccgtagaggtcaaccttgttggtacagacaaccaggtgttggtcttattgccatttgggatgccttcttattggaatctggaatctacattatcctaaagaagcagttcagatcccacccagcatatatcgatattgttgaactatttcacgaaactacttggcaaacagaattgggtcaattgtgcgacttaattaccgctccagaggacaaagttgatttggataatttctccatggaaaagtacatgtttatcgttacttataagaccgcttactatagcttctacctgcctgtcgccttggcacttttgtacctgcaattggctactccagaaaacctacaacaggctcatgacatcttaattccattgggtcaatacttccaagtgcaagatgactacttagatgcctacggtgacccagaagtcatcggtaagataggaactgacatccaagataacaagtgttcttggattgttaatcaagctttacagagatgtaatgctgaacaaagaaaactgttggacacttgttatggtagaaaagatgctgcattggaggctaaggttaaagaattgtttaaggaactagatttggaaaccgtctacaaggaatatgaggaaaagattgttggtgaaatcaagacgaaaattgctgccgtggatgaatcgcaaggtttaaagaaggaggttttcgaagccttcttgggcaagatttacaagcgtacaaaaggcggaggtggttctggtgggggtggttcgggtggtggtgggtcaggtggtggcggtagcggtggcggtggttccggtggtggtggtagtggaggtgggggttcttcagccgggagcgaccagatagaaggaagtcctcatcacgagtctgataactccattgcgacaaaaatcctgaatttcggtcatacgtgctggaagttacaaaggccctatgtcgtgaaaggtatgatttcgatagcttgtggcttgtttggtcgcgaactatttcataataccaaccttttatcttggtcattgatgctcaaggcattctcatccttaatggtaatcctttcttttaatttctttgctgccataatgaatcaaatttacgatgttgatattgaccgaattaacaaaccagatttgccactcgttagtggagagatgagtatcgaaactgcatggatactatcgatcattgtcgctctgacaggcttaatattgactattaagcttaattgtggtccgctatttatatcattgtattgcgtatctattttcgctggatttgcatacagcgttcctccaattcgttggaaacagtatcctttcaccaacttcttaataactatcagctcacacgtgggtgttaactttacatgttattacgcctccagagcagcctttggcttacccttcgaaatgtctccgccatttacttttattctcgcttttatgaccgtaatgggaatgacaatagctttcgcgaaagacatttcagatatcgaaggtgatgcgaaatatggggtgtctactgttgctacgaagttaggtgcaagaaatatgacgtttgttgtcagtggtgtcttgttgctgacatacgtaagcgctatacttgcagctatcatttggccgcaagcctttaagtcaaatgtgatgttgttatctcatgccatcctggcgttctgcctaattttccaaactagagagctagcgcttgcaaattatgcttctgcacctagtaggcagttttttgaatttatctggaaattgcattatgcagagtacttagtttatgttttcatctaa

SEQ ID NO: 590 - DNA, 2115 bp, Artificial Sequence
  Synthetic
atggctaagagcgccgctctggaaaaatttgagtccatattccctaccctagtcgaagacgttcttgcacactcaaagtcttatggcttaccccaacaggctttggattggttcaaggccaatttgaacgctaacgccatcggtggtaaatgcaaccgtggtatgtcggtaccagactctgtgtccttgatgacaggaaaggaactgaatgaagaggaatactttaaggctgctacgttaggttggttgactgaattgttgcaagcttactggcttgtcagtgatgatattatggactcttctattaccagaagaggtgttccatgttggtataggcaaccagaagttggtatgatcgcaattaacgatgccttcatgttagaaagtgctatctacatattgttgaagaaatactttagatcccataagtcttatgttgacctaatggaattattccacgaggtcactttccaaactgaattgggccaaacttgtgacttgcttaccgctccagaagataaagttgatttggataatttttcaatggaaaagtacactttcatcgttatttacaaaacggcttattactctttttacttgccagttgccttagctttacatcaattgggtattgcaaccgagaagaaccttaagcaggccgaagctattttgatccctctaggtacatacttccaaattcaagacgactatttggataattttggtgacccagctcacatcggtaagataggtactgacatcctagataacaaatgttcctggttggtcaacaaagctttgttaattgcaacccctgaacaaagaaaggtactagaagaaaattacggtagaaagaataaggataacgaagctgtcgtgaaaaagttgtacaacgaactggcattggagaagttgtatcaagaatacgaagaatcggaggttactaaaattaagaagttaattgaagaaacagatgaaagcgaaggattaaagaaatctgtattcgagtccttcttgggtaagatctataagcgtactaagggcggaggtggttctggtgggggtggttcgggtggtggtgggtcaggtggtggcggtagcggtggcggtggttccggtggtggtggtagtggaggtgggggttcttcagccgggagcgaccagatagaaggaagtcctcatcacgagtctgataactccattgcgacaaaaatcctgaatttcggtcatacgtgctggaagttacaaaggccctatgtcgtgaaaggtatgatttcgatagcttgtggcttgtttggtcgcgaactatttcataataccaaccttttatcttggtcattgatgctcaaggcattctcatccttaatggtaatcctttcttttaatttctttgctgccataatgaatcaaatttacgatgttgatattgaccgaattaacaaaccagatttgccactcgttagtggagagatgagtatcgaaactgcatggatactatcgatcattgtcgctctgacaggcttaatattgactattaagcttaattgtggtccgctatttatatcattgtattgcgtatctattttcgctggatttgcatacagcgttcctccaattcgttggaaacagtatcctttcaccaacttcttaataactatcagctcacacgtgggtgttaactttacatgttattacgcctccagagcagcctttggcttacccttcgaaatgtctccgccatttacttttattctcgcttttatgaccgtaatgggaatgacaatagctttcgcgaaagacatttcagatatcgaaggtgatgcgaaatatggggtgtctactgttgctacgaagttaggtgcaagaaatatgacgtttgttgtcagtggtgtcttgttgctgacatacgtaagcgctatacttgcagctatcatttggccgcaagcctttaagtcaaatgtgatgttgttatctcatgccatcctggcgttctgcctaattttccaaactagagagctagcgcttgcaaattatgcttctgcacctagtaggcagttttttgaatttatctggaaattgcattatgcagagtacttagtttatgttttcatctaa

SEQ ID NO: 591 - DNA, 2130 bp, Artificial Sequence
  Synthetic
atggccgcattaacaaatggtcaggacaggagagctcgttttaccgctgtgttccctaaacttcaaaaggaactaatagagttcgttatcgctcaaggatttccacaagaagccttgtcttggttccaaagaaacctggaatataacgctccaggcggtaagttgaatcgtggtatgtccgtagtcgatacgttggaaattttgagaggtgagcccttatcggaagaagaatactttaaatcagctttgcttggttggtgtgtcgaactattgcaagccttcttcctggtttctgatgacattatggacacttccatcactagaagaggccaaccatgctggtacagagtcgagggtgttggtatgattgctatctgggatgctttcatgttggaaggtgccatttatcacttgttaaagagccattttcgtaaggattcttactacgttgatttattggacttgttccacgaaaccacttttcagacagaacttggtcaattgattgatttgatcaccgctccagaagaccatattgacttagacagattctctttaagaaaacaccaattgatagtcatctacaagactgcatattactcgttctaccttcctgttgctttggctatgtatatggccggtattcaagatcaagctgcctttaagcaagctcaggacatcctaataccattgggtgaatactttcaagttcaagatgactatttggattgttacggtgctcctgagttcatcggaaagattggtaccgacatcctggataacaagtgttcttggaatgtcaacgttgcactagctgcatgcaccccagaacaaagaagagtattggatgaaacttacggtaggaaagactccatctgtgaagccaaggttaaagaaattttcttagctgtcgatattccaggcaagtacgcagcttatgaacaacagtcatacgagaaaattaacggtttgatcgatggtattgctgaaacgccaggtggattaaagagagatgtgtttagagcattccttagtaagatatataaaagaactaagggcggaggtggttctggtgggggtggttcgggtggtggtgggtcaggtggtggcggtagcggtggcggtggttccggtggtggtggtagtggaggtgggggttcttcagccgggagcgaccagatagaaggaagtcctcatcacgagtctgataactccattgcgacaaaaatcctgaatttcggtcatacgtgctggaagttacaaaggccctatgtcgtgaaaggtatgatttcgatagcttgtggcttgtttggtcgcgaactatttcataataccaaccttttatcttggtcattgatgctcaaggcattctcatccttaatggtaatcctttcttttaatttctttgctgccataatgaatcaaatttacgatgttgatattgaccgaattaacaaaccagatttgccactcgttagtggagagatgagtatcgaaactgcatggatactatcgatcattgtcgctctgacaggcttaatattgactattaagcttaattgtggtccgctatttatatcattgtattgcgtatctattttcgctggatttgcatacagcgttcctccaattcgttggaaacagtatcctttcaccaacttcttaataactatcagctcacacgtgggtgttaactttacatgttattacgcctccagagcagcctttggcttacccttcgaaatgtctccgccatttacttttattctcgcttttatgaccgtaatgggaatgacaatagctttcgcgaaagacatttcagatatcgaaggtgatgcgaaatatggggtgtctactgttgctacgaagttaggtgcaagaaatatgacgtttgttgtcagtggtgtcttgttgctgacatacgtaagcgctatacttgcagctatcatttggccgcaagcctttaagtcaaatgtgatgttgttatctcatgccatcctggcgttctgcctaattttccaaactagagagctagcgcttgcaaattatgcttctgcacctagtaggcagttttttgaatttatctggaaattgcattatgcagagtacttagtttatgttttcatctaa

SEQ ID NO: 592 - DNA, 2115 bp, Artificial Sequence
  Synthetic
atggccactaaggctaccagagctgatttcgaaaaagtctttccctctctagttgaggaccttttaggcgaagcacgtaagtataacttgccagataatgctttgcagtggttcgaaaggtcactgaacgccaatacacctggtggtaaattaaacagaggaatgtccgtgccagacacgggtagccaattgttggaaagaccattgtctccagaagaatttaaggacttagctactttaggttggttgaccgaattgttgcaagcattctggcttgtatctgatgatattatggacgctagtataaccagaagaggtgaaccttgttggtaccgtagagaaggtgttggtatgatcgccattaacgattctttcatgttagagtccggcatctacttgattttgaagaagcattttagatcgcacccagcttatcttgacctaatcgaactattccacgaggtcacttggcaaactgaattaggtcaactgtgcgacttgataaccgctccagaagatcatgttgacttgaacaatttctccatggagaagtacacatttattgttatctacaaaacggcctattactcattctatttgccagtcgctttagctttacactacttgagattggctactcctcaaaatttgaaacaagcccatgatattctgattccattgggtgaatactttcaaatccaagatgactatctggatgcatttggagatccatcggtcattggtaagattggtactgatatcaaggacaacaagtgtggctggttgataaaccaagctctacagatctgtacccccgaacagagaaaggttttggacgaaaactacggtcaaaaggatgacgctaaggaagccaaagtgaaagaattgtataatgaactacaattggagaagcgttacagagattacgaagaaaagagggttggtgaaattagacaaatgattgctaatgtggacgagagtgctggactgaaaaaaggtgttttcgaagaatatctggctaagatctacaagagatctaagggcggaggtggttctggtgggggtggttcgggtggtggtgggtcaggtggtggcggtagcggtggcggtggttccggtggtggtggtagtggaggtgggggttcttcagccgggagcgaccagatagaaggaagtcctcatcacgagtctgataactccattgcgacaaaaatcctgaatttcggtcatacgtgctggaagttacaaaggccctatgtcgtgaaaggtatgatttcgatagcttgtggcttgtttggtcgcgaactatttcataataccaaccttttatcttggtcattgatgctcaaggcattctcatccttaatggtaatcctttcttttaatttctttgctgccataatgaatcaaatttacgatgttgatattgaccgaattaacaaaccagatttgccactcgttagtggagagatgagtatcgaaactgcatggatactatcgatcattgtcgctctgacaggcttaatattgactattaagcttaattgtggtccgctatttatatcattgtattgcgtatctattttcgctggatttgcatacagcgttcctccaattcgttggaaacagtatcctttcaccaacttcttaataactatcagctcacacgtgggtgttaactttacatgttattacgcctccagagcagcctttggcttacccttcgaaatgtctccgccatttacttttattctcgcttttatgaccgtaatgggaatgacaatagctttcgcgaaagacatttcagatatcgaaggtgatgcgaaatatggggtgtctactgttgctacgaagttaggtgcaagaaatatgacgtttgttgtcagtggtgtcttgttgctgacatacgtaagcgctatacttgcagctatcatttggccgcaagcctttaagtcaaatgtgatgttgttatctcatgccatcctggcgttctgcctaattttccaaactagagagctagcgcttgcaaattatgcttctgcacctagtaggcagttttttgaatttatctggaaattgcattatgcagagtacttagtttatgttttcatctaa

SEQ ID NO: 593 - DNA, 2115 bp, Artificial Sequence
  Synthetic
atggctaccaggatatctcgttcagaatttgaggcattcgtagccccacttattgaagaaatcattcagagcactgaacaatacaaattgcctgagaatgctagacaatggttcgaagcttcgctaaaggccaacatcgttggaggcaagatgaacagaggtatgtccgtcccagatacagcttctattttactgggtagaccattgactgctgacgaattgaagcacttagccttgttgggttggtttacggagttattgcaagctttcttcctggtttccgacgatattatggacagttctatcaccagaagaggtcaaccctgctggtatcgtcaagaaggtgtcggtttaattgcaatatgggatgcctttatgttggaatcagctatctacgttattcttaaaaagtatttcagatctcatccagcttacgtggatttgttggaattgttccacgaaactacctaccaaacagaattaggtcaactatgtgacttgatcactgctcctgaagataaggtcgacttagataatttttcgatggaaaaatacacctttatcgttaagtataagactgcatactactccttctacttaccagttactttggctttgcactatttgcaattggccacaccaaacaatcttaagcagtgtgaagacattttaatcccactgggagagtacttccaaattcaggatgactatcttgacgcattcggtttgccagaaaccatcggtaaaattggtactgatatccaagataacaaatgttcatggctagtaaaccaagctttgactatggtcacccccgaacaaagacaacttttgaacgaggcctacggtagaaaggattctgctctggaagctaaggttaaggctttgtataatgacttgaagttagaacaacattacttgaattttgaagaagaacgtgtcggtaatctgagaagacagatttcagccgtcgatgaatccgaaggtttaaagaaagaaatttttagtgctttcttggataaaatctacaagagatctaagggcggaggtggttctggtgggggtggttcgggtggtggtgggtcaggtggtggcggtagcggtggcggtggttccggtggtggtggtagtggaggtgggggttcttcagccgggagcgaccagatagaaggaagtcctcatcacgagtctgataactccattgcgacaaaaatcctgaatttcggtcatacgtgctggaagttacaaaggccctatgtcgtgaaaggtatgatttcgatagcttgtggcttgtttggtcgcgaactatttcataataccaaccttttatcttggtcattgatgctcaaggcattctcatccttaatggtaatcctttcttttaatttctttgctgccataatgaatcaaatttacgatgttgatattgaccgaattaacaaaccagatttgccactcgttagtggagagatgagtatcgaaactgcatggatactatcgatcattgtcgctctgacaggcttaatattgactattaagcttaattgtggtccgctatttatatcattgtattgcgtatctattttcgctggatttgcatacagcgttcctccaattcgttggaaacagtatcctttcaccaacttcttaataactatcagctcacacgtgggtgttaactttacatgttattacgcctccagagcagcctttggcttacccttcgaaatgtctccgccatttacttttattctcgcttttatgaccgtaatgggaatgacaatagctttcgcgaaagacatttcagatatcgaaggtgatgcgaaatatggggtgtctactgttgctacgaagttaggtgcaagaaatatgacgtttgttgtcagtggtgtcttgttgctgacatacgtaagcgctatacttgcagctatcatttggccgcaagcctttaagtcaaatgtgatgttgttatctcatgccatcctggcgttctgcctaattttccaaactagagagctagcgcttgcaaattatgcttctgcacctagtaggcagttttttgaatttatctggaaattgcattatgcagagtacttagtttatgttttcatctaa

SEQ ID NO: 594 - DNA, 2109 bp, Artificial Sequence
  Synthetic
atgcccgttactctaaaagaatttgagagtgtattccctcaattagtggaagacgttctggctcattgcaagcagtataatttgccagataacgcattgcaatggttcaagaactcacttaatcacaacaccgtcggtggaaagtgtaacaggggcatgtctgtcgttgacacgtcttccttgttactgggtcgtgatttgactaaagatgaatttttccactctgccacactaggttggatgattgaattgttacaagctttctttttggtcagcgacgacatcatggattcgtccaagaccagaagaggtagcccatgttggtaccttatgccagatgttggtatgatagctatttgggacgcctttatgttggaggcttccatctacgttcttttgaaaaagtatttcagacaaaataagcattacattgatttagtagaattgttccacgaagtcaccttccaaactgaattgggtcaggcttgtgacttactaactgccccagaagataaagttgacttggacaacttctctttggagaagtacacttttatcgtgatatataagaccgcttactactcattttatttgcctgttgctctagcattgtacttttgtgatcaagctacaccaaagaaccttcaaattgctaaggatatcttaattccaatgggtgaatacttccaaatccaagatgactatttagacaatttcgctgatcccactgtcttgggtaagattggcacggatattcaggataataaatgctcttggttagtcaaccaagcattgaagatcgccaccccagaacaaagacaagttttagaaaagaactatggtagaaaagatgctgcctgtgaagctgaagttaagaagctgtacgaggaattaaatttgaagaaaatttacgaagactatgaagaaaagagagtttctgaaataagggacatgatcgctaacattgacgagtctgaaggattgaaaaagtccgtatttgaagagttcttgcgtaaaatatacaaaagatcaaagggcggaggtggttctggtgggggtggttcgggtggtggtgggtcaggtggtggcggtagcggtggcggtggttccggtggtggtggtagtggaggtgggggttcttcagccgggagcgaccagatagaaggaagtcctcatcacgagtctgataactccattgcgacaaaaatcctgaatttcggtcatacgtgctggaagttacaaaggccctatgtcgtgaaaggtatgatttcgatagcttgtggcttgtttggtcgcgaactatttcataataccaaccttttatcttggtcattgatgctcaaggcattctcatccttaatggtaatcctttcttttaatttctttgctgccataatgaatcaaatttacgatgttgatattgaccgaattaacaaaccagatttgccactcgttagtggagagatgagtatcgaaactgcatggatactatcgatcattgtcgctctgacaggcttaatattgactattaagcttaattgtggtccgctatttatatcattgtattgcgtatctattttcgctggatttgcatacagcgttcctccaattcgttggaaacagtatcctttcaccaacttcttaataactatcagctcacacgtgggtgttaactttacatgttattacgcctccagagcagcctttggcttacccttcgaaatgtctccgccatttacttttattctcgcttttatgaccgtaatgggaatgacaatagctttcgcgaaagacatttcagatatcgaaggtgatgcgaaatatggggtgtctactgttgctacgaagttaggtgcaagaaatatgacgtttgttgtcagtggtgtcttgttgctgacatacgtaagcgctatacttgcagctatcatttggccgcaagcctttaagtcaaatgtgatgttgttatctcatgccatcctggcgttctgcctaattttccaaactagagagctagcgcttgcaaattatgcttctgcacctagtaggcagttttttgaatttatctggaaattgcattatgcagagtacttagtttatgttttcatctaa

SEQ ID NO: 595 - DNA, 2115 bp, Artificial Sequence
  Synthetic
atggccgcaaaaaccaatagggctgactttgagtcagtattcccttccctagtcaaggatgtttcggaccacgctatgcagtatggccttccatctgctgccttggaatggttccaaaacagcatgaacgctaacacacccggaggtaagttgaatcgtggtttatccgttccagatacgggtttggctctgttggaaaaaccattaaacgatgaacaatttaagcatctttgcactttgggttggatgactgaatttttgcaagccttcttcttggtgtctgacgacatgatggatagttctataaccagaagaggtgaaccatgttggtacagaagacctaacgtcggtatgattgctatctgggatgcattcatgttagagtctactatctacgtcttgttgaagaaacacttcagatcccatccagcttatgttgactttttagaactattccacgaagtctctttccaaaccgaattaggtcaattgtgtgatctactaactgcaccagaagacaatgttgacttgaacaactttaatatggataagttcaatttcattgttatttacaagaccgcttactactctttttatttgccagttgctctggccctacattacttgcaattggctacacctagtaacttgaggcaggcacacgatatcttaattccacttggtcaatactttcaagcccaagacgattatttggacgtcttcggaaagccagaacaaatcggtaagattggtactgatattcaggacaataagtgttcatgggttatcaaccaagctttaaaaagatgttccgctgaacaaagaaaggtgttagacgaatcctatggtcgtaaagatgctgctatggaggccaaagtcaaggtggtttttaacgagttgaacttggaaaaggtttacagagatttcgaagaagaacaagtcggtaagatcagaaccatgattgctggtttggatgagtccgaaggtttaaagaaaggcgttttcgaatcttttttagccaaaatatacaagagggacaaaggcggaggtggttctggtgggggtggttcgggtggtggtgggtcaggtggtggcggtagcggtggcggtggttccggtggtggtggtagtggaggtgggggttcttcagccgggagcgaccagatagaaggaagtcctcatcacgagtctgataactccattgcgacaaaaatcctgaatttcggtcatacgtgctggaagttacaaaggccctatgtcgtgaaaggtatgatttcgatagcttgtggcttgtttggtcgcgaactatttcataataccaaccttttatcttggtcattgatgctcaaggcattctcatccttaatggtaatcctttcttttaatttctttgctgccataatgaatcaaatttacgatgttgatattgaccgaattaacaaaccagatttgccactcgttagtggagagatgagtatcgaaactgcatggatactatcgatcattgtcgctctgacaggcttaatattgactattaagcttaattgtggtccgctatttatatcattgtattgcgtatctattttcgctggatttgcatacagcgttcctccaattcgttggaaacagtatcctttcaccaacttcttaataactatcagctcacacgtgggtgttaactttacatgttattacgcctccagagcagcctttggcttacccttcgaaatgtctccgccatttacttttattctcgcttttatgaccgtaatgggaatgacaatagctttcgcgaaagacatttcagatatcgaaggtgatgcgaaatatggggtgtctactgttgctacgaagttaggtgcaagaaatatgacgtttgttgtcagtggtgtcttgttgctgacatacgtaagcgctatacttgcagctatcatttggccgcaagcctttaagtcaaatgtgatgttgttatctcatgccatcctggcgttctgcctaattttccaaactagagagctagcgcttgcaaattatgcttctgcacctagtaggcagttttttgaatttatctggaaattgcattatgcagagtacttagtttatgttttcatctaa

SEQ ID NO: 596 - DNA, 2115 bp, Artificial Sequence
  Synthetic
atggctaagtctgcatcgctagagaaattcgaatcaatctttcccacgttagttgaagacgtgttggcccactccaagagctacggtttgcctcagcaagctcttgattggttcaagaacaatttgaacgctaatgccattggcggtaagtgcaaccgtggtatgtctgtcccagatagtgtttccctgatgactggtaaagaattaaacgaagaagaatattttaaggctgccacattgggatggttgaccgaattacttcaagcatacttcttggtatccgacgacataatggattcttctatcaccaggagaggtgttccatgttggtatagacaaccagaggtcggtatgattgctatttgggatgctttcatgttagaaagtgctatctacatattgttgaaaaagtactttagatcgcataagtcatacgtcgatttgatggaactattccacgaagttacttttcaaactgaattgggtcaaacttgtgacttgttaaccgccccagaagacaaagttgatttagacaatttctctatggagaagtatacattcattgtcatctataagaccgcttactactctttttatctgcctgttgcattagctttgcatcaattgggtattgctactgaaaagaacttgaaacaggctgaagctattctaatcccacttggtacttactttcaaatccaagatgactacttggataacttcggtgacccagaacacattggcaagataggtaccgatatcctagataataagtgttcatggttggtaaacaaagctcttttgattgccactcctgaacaaagaaaagtgctggaggagaactacggcagaaagaataaagacaacgaagccgtcgttaagaagttgtacgatgaactagctttggaaaaactgtatcaagaatatgaagagagtgaagtaggtaagattcgtaagctaatcgatggtacagatgaatccgaaggtttaaagaagtctgttttcgaatctttcttgggtaaaatctataaaagaaccaaaggcggaggtggttctggtgggggtggttcgggtggtggtgggtcaggtggtggcggtagcggtggcggtggttccggtggtggtggtagtggaggtgggggttcttcagccgggagcgaccagatagaaggaagtcctcatcacgagtctgataactccattgcgacaaaaatcctgaatttcggtcatacgtgctggaagttacaaaggccctatgtcgtgaaaggtatgatttcgatagcttgtggcttgtttggtcgcgaactatttcataataccaaccttttatcttggtcattgatgctcaaggcattctcatccttaatggtaatcctttcttttaatttctttgctgccataatgaatcaaatttacgatgttgatattgaccgaattaacaaaccagatttgccactcgttagtggagagatgagtatcgaaactgcatggatactatcgatcattgtcgctctgacaggcttaatattgactattaagcttaattgtggtccgctatttatatcattgtattgcgtatctattttcgctggatttgcatacagcgttcctccaattcgttggaaacagtatcctttcaccaacttcttaataactatcagctcacacgtgggtgttaactttacatgttattacgcctccagagcagcctttggcttacccttcgaaatgtctccgccatttacttttattctcgcttttatgaccgtaatgggaatgacaatagctttcgcgaaagacatttcagatatcgaaggtgatgcgaaatatggggtgtctactgttgctacgaagttaggtgcaagaaatatgacgtttgttgtcagtggtgtcttgttgctgacatacgtaagcgctatacttgcagctatcatttggccgcaagcctttaagtcaaatgtgatgttgttatctcatgccatcctggcgttctgcctaattttccaaactagagagctagcgcttgcaaattatgcttctgcacctagtaggcagttttttgaatttatctggaaattgcattatgcagagtacttagtttatgttttcatctaa

SEQ ID NO: 597 - DNA, 2127 bp, Artificial Sequence
  Synthetic
atgtcgaaggaatccaatcgtgctaaatttgttgcagagttccctgaactggtgaaggaactaaagtcagtcttgacaggatacggcatgccagctgaagccgttaaatggtatgaggattctcttaactacaacaccccaggtggtaagttgaacagaggtttaagcgtagtcgacacgtacgctattttgaaaggttatgccagtgttgatgacttacccgttgaagtctacaagaaggttgctttgcttggttggtgtatcgaattgttgcaagcttatttcttggtggctgacgatatgatggatcagtctataactagaaggggtcaaccatgctggtacagagtgaaggaagtcggtgatattgcaatctgggacgcctttatgttagaaggcgctatttatgtcctattgaaaaagcacttcagacaagagccatactacgttgacctgatcgaattgttccatgacgttacttttcaaaccgaattaggtcaattgttagatttgattactgctcctgaagacaaggttgatctgtctaaattctccttggaaaagcactctttcatcgttacctttaaaactgcttactatagtttctatctacccgtcgccctagctatgtacgtagccggtatttccgatccaaaggacttgcaacaggcacatgatgttttgattccattaggtgaatacttccaaatacaagatgactacttggactgttttggtaccgctgagcaaatcggtaaaattggtacggatatccaggacaataagtgtagttgggtcgttaacaaggctctacaacttgcatctccagaacaaagaaagttgttggacgaaaattatggcaaaaaggatgctgaatgcgaagccagatgtaaaaagttattccacgatttggacatccaaaagcattaccaagcttacgaggaaaaggtagcccaggaccttagagctaagatagcccaaactgatgaatcacgtggtttcagagcccaagtcttgacagcttttttgaacaaggtttacaagaggtctaaaggcggaggtggttctggtgggggtggttcgggtggtggtgggtcaggtggtggcggtagcggtggcggtggttccggtggtggtggtagtggaggtgggggttcttcagccgggagcgaccagatagaaggaagtcctcatcacgagtctgataactccattgcgacaaaaatcctgaatttcggtcatacgtgctggaagttacaaaggccctatgtcgtgaaaggtatgatttcgatagcttgtggcttgtttggtcgcgaactatttcataataccaaccttttatcttggtcattgatgctcaaggcattctcatccttaatggtaatcctttcttttaatttctttgctgccataatgaatcaaatttacgatgttgatattgaccgaattaacaaaccagatttgccactcgttagtggagagatgagtatcgaaactgcatggatactatcgatcattgtcgctctgacaggcttaatattgactattaagcttaattgtggtccgctatttatatcattgtattgcgtatctattttcgctggatttgcatacagcgttcctccaattcgttggaaacagtatcctttcaccaacttcttaataactatcagctcacacgtgggtgttaactttacatgttattacgcctccagagcagcctttggcttacccttcgaaatgtctccgccatttacttttattctcgcttttatgaccgtaatgggaatgacaatagctttcgcgaaagacatttcagatatcgaaggtgatgcgaaatatggggtgtctactgttgctacgaagttaggtgcaagaaatatgacgtttgttgtcagtggtgtcttgttgctgacatacgtaagcgctatacttgcagctatcatttggccgcaagcctttaagtcaaatgtgatgttgttatctcatgccatcctggcgttctgcctaattttccaaactagagagctagcgcttgcaaattatgcttctgcacctagtaggcagttttttgaatttatctggaaattgcattatgcagagtacttagtttatgttttcatctaa

SEQ ID NO: 598 - DNA, 2115 bp, Artificial Sequence
  Synthetic
atggctcaacagacaaccctacaagagtttaactcggtgtaccctaagttggaagaagcattactggatcatgctcgttcttataaacttccccaagaacaattggactggtacaagagatcattagaagtaaatccattgggtggaaagtgtaacagaggtatgtccgttccagattctgtcagcttgttgttggaaaaaccacttactgaagagcaatacttccaggccgctacgttaggttggatgactgaattgctacaagccttctttttggttagtgacgatataatggactcctctatcaccagaaggggccaaccatgctggtatagacaagaaggtgttggaatgattgctatttgggatgctttcatgctggaatctgccatctacactctattaaagaagtacttcagatcccaccctgcttatgtcgatttaattgaattgtttcacgaaacaactttccaaaccgaattgggtcaactttgtgacttgttaaccgcccccgaggacaatgtcaacttggataactttagtttggaaaaatactctttcatcgttatatataagactgcttactattctttttacttaccagttgctttggcattgcatcaacttaatttagccactccaagcaacttaaaacaagctgaagacattctgatcccattgggtgagtacttccagattcaagatgattatttggataacttcggcaagccagaacacattggtaagataggtaccgacattaaggacaataagtgttcctggttggtaaatcaagctttggctgtcgctactccagaacagcgtaaaatcttggaggaaaactacggtagaaaggacgacgaaaaggaaaaagttgtgaagaaactatacgatgaccttaacttggaacaaagatatttggattacgaggaaaaagttgtcggtcaaatcagagaacgtatcgcaaacattgatgaaaatgaaggtcttaagaagacggtgtttgaagcattcctggctaaaatttacaagagaagtaagggcggaggtggttctggtgggggtggttcgggtggtggtgggtcaggtggtggcggtagcggtggcggtggttccggtggtggtggtagtggaggtgggggttcttcagccgggagcgaccagatagaaggaagtcctcatcacgagtctgataactccattgcgacaaaaatcctgaatttcggtcatacgtgctggaagttacaaaggccctatgtcgtgaaaggtatgatttcgatagcttgtggcttgtttggtcgcgaactatttcataataccaaccttttatcttggtcattgatgctcaaggcattctcatccttaatggtaatcctttcttttaatttctttgctgccataatgaatcaaatttacgatgttgatattgaccgaattaacaaaccagatttgccactcgttagtggagagatgagtatcgaaactgcatggatactatcgatcattgtcgctctgacaggcttaatattgactattaagcttaattgtggtccgctatttatatcattgtattgcgtatctattttcgctggatttgcatacagcgttcctccaattcgttggaaacagtatcctttcaccaacttcttaataactatcagctcacacgtgggtgttaactttacatgttattacgcctccagagcagcctttggcttacccttcgaaatgtctccgccatttacttttattctcgcttttatgaccgtaatgggaatgacaatagctttcgcgaaagacatttcagatatcgaaggtgatgcgaaatatggggtgtctactgttgctacgaagttaggtgcaagaaatatgacgtttgttgtcagtggtgtcttgttgctgacatacgtaagcgctatacttgcagctatcatttggccgcaagcctttaagtcaaatgtgatgttgttatctcatgccatcctggcgttctgcctaattttccaaactagagagctagcgcttgcaaattatgcttctgcacctagtaggcagttttttgaatttatctggaaattgcattatgcagagtacttagtttatgttttcatctaa

SEQ ID NO: 599 - DNA, 2127 bp, Artificial Sequence
  Synthetic
atgtcgaaggaagacaaacgtaataagtttttatctgtcttccctcaattggttgatgagcttaaatccatcttggctggatacggcatgacgcaggatgcactacaatggtatgaaaactcactgaactacaatacaccaggtggtaagttgaacaggggtctatctgtagttgacacttacgctattttaaagggtaaaagctcctatgaagaattgtctgaagaagagtacttcaagttggccatgttaggttggtgtatagaattgttgcaagcttattggcttgtggccgatgacatgatggataagtctattaccagaagaggtcaaccatgctggtacagagttcccgaagtcggtgaagttgctatcaacgacgcttttatgttggagggcgctatttattgtttattgaagaatcacttcaaaaaggaagcatactacgtcgacttattggaattattccatgatgttacttttcagaccgaattgggtcaaatgcttgatttgatcactgccccagaagacagagttgatctggacaagttcagcttggagagacacagtttcatcgtcagatttaaaaccgcttattactcattttacttaccagtcgctttggctatgtacgtagccggtgtttccgatgaacaagacttaaagcaagcacaagacgttttgattcctctaggtgaatatttccagatccaagatgatttcttggattgttttggtaagccagaagacattggtaagataggaactgatatacaagataacaagtgctcttgggtcgttaacactgccttgaaactgtgttccgctgaacaacgtaaagtactggacgctaattatggaagaaagaacagtgaatctgaggctaagtgtaagcaagtttttgatgatttgaagatcgacagtatttaccatgactatgaagagaaaaccgcacaaaatttaagaaatatgattcagaacacagatgaaaccaggggtttcaagtctcaagtgttgactgtctttcttgaaaaagtctacaagagaaaaaagggcggaggtggttctggtgggggtggttcgggtggtggtgggtcaggtggtggcggtagcggtggcggtggttccggtggtggtggtagtggaggtgggggttcttcagccgggagcgaccagatagaaggaagtcctcatcacgagtctgataactccattgcgacaaaaatcctgaatttcggtcatacgtgctggaagttacaaaggccctatgtcgtgaaaggtatgatttcgatagcttgtggcttgtttggtcgcgaactatttcataataccaaccttttatcttggtcattgatgctcaaggcattctcatccttaatggtaatcctttcttttaatttctttgctgccataatgaatcaaatttacgatgttgatattgaccgaattaacaaaccagatttgccactcgttagtggagagatgagtatcgaaactgcatggatactatcgatcattgtcgctctgacaggcttaatattgactattaagcttaattgtggtccgctatttatatcattgtattgcgtatctattttcgctggatttgcatacagcgttcctccaattcgttggaaacagtatcctttcaccaacttcttaataactatcagctcacacgtgggtgttaactttacatgttattacgcctccagagcagcctttggcttacccttcgaaatgtctccgccatttacttttattctcgcttttatgaccgtaatgggaatgacaatagctttcgcgaaagacatttcagatatcgaaggtgatgcgaaatatggggtgtctactgttgctacgaagttaggtgcaagaaatatgacgtttgttgtcagtggtgtcttgttgctgacatacgtaagcgctatacttgcagctatcatttggccgcaagcctttaagtcaaatgtgatgttgttatctcatgccatcctggcgttctgcctaattttccaaactagagagctagcgcttgcaaattatgcttctgcacctagtaggcagttttttgaatttatctggaaattgcattatgcagagtacttagtttatgttttcatctaa

SEQ ID NO: 600 - DNA, 2124 bp, Artificial Sequence
  Synthetic
atggataaggctgccgcacgtcaaaaatttgttgctgaatttgacaatctagtaaaggagcttcaggaaatatctgctggttataacatgcctaaggaagccattgaatggttcacgaaaaacctggaatacaacaccccaggcggtaagttaaatagaggtttgtccgttatcgatacatactgcatcttgaagaacaagactgtcgagagtttggctgctgacgaatacaaaaaggtggctttattgggttgggcaattgaattgcttcaagcttatttcttggtcgccgatgacatgatggatcaaagcaagaccagaagaggacaaccatgttggtacttagctgaaggtgttggtaatatcgccatttgggactcgttcatgttggaaggtgctatatacattttattgaagaaacacttcaggcaagatctatattacgttgacctattggatttgtttcatgaagtcacttttcagactgagctgggccaattgctggatttagtaaccgccgacgaagaacacgttgatctgtccaagttctctttggaaaagcattcattcatcgtcatttttaaaactgcttattactctttctatttgcccgttgccttagctatgtacatgtgtggtatcaactctgatgaggacttgaaacaagtgaaggacgttttaattccactaggtgaatacttccaaattcaagatgattatttggactgttttggtacaccagaacagatcggtaaaattggcaccgatatcaaggacaataagtgttcatgggtcgttaaccaagctctacttaaagctaatgaatcccaaagacaagttttggacgataactacggtaagaaagatgacgaatctgagcaaagagtcaaggatcttttcgcagaattgcagataccttccatttacgaacaatacgaggaagaagtggttgcaaagttacgtgctcaaatcgaaaagatagacgaatcgagaggtctaaagaaggaagtcttgtcttcttttctggccaaggtctataaaagatcaaagggcggaggtggttctggtgggggtggttcgggtggtggtgggtcaggtggtggcggtagcggtggcggtggttccggtggtggtggtagtggaggtgggggttcttcagccgggagcgaccagatagaaggaagtcctcatcacgagtctgataactccattgcgacaaaaatcctgaatttcggtcatacgtgctggaagttacaaaggccctatgtcgtgaaaggtatgatttcgatagcttgtggcttgtttggtcgcgaactatttcataataccaaccttttatcttggtcattgatgctcaaggcattctcatccttaatggtaatcctttcttttaatttctttgctgccataatgaatcaaatttacgatgttgatattgaccgaattaacaaaccagatttgccactcgttagtggagagatgagtatcgaaactgcatggatactatcgatcattgtcgctctgacaggcttaatattgactattaagcttaattgtggtccgctatttatatcattgtattgcgtatctattttcgctggatttgcatacagcgttcctccaattcgttggaaacagtatcctttcaccaacttcttaataactatcagctcacacgtgggtgttaactttacatgttattacgcctccagagcagcctttggcttacccttcgaaatgtctccgccatttacttttattctcgcttttatgaccgtaatgggaatgacaatagctttcgcgaaagacatttcagatatcgaaggtgatgcgaaatatggggtgtctactgttgctacgaagttaggtgcaagaaatatgacgtttgttgtcagtggtgtcttgttgctgacatacgtaagcgctatacttgcagctatcatttggccgcaagcctttaagtcaaatgtgatgttgttatctcatgccatcctggcgttctgcctaattttccaaactagagagctagcgcttgcaaattatgcttctgcacctagtaggcagttttttgaatttatctggaaattgcattatgcagagtacttagtttatgttttcatctaa

SEQ ID NO: 601 - DNA, 2208 bp, Artificial Sequence
  Synthetic
atgcctgcacccaccaatccaacagagatagccctgcaagcttcgactactaacggtatgagtagcgctgaaaagaaaaagcaggctcgtgccaaattcgaaggagtttatcaagtacttagaaaggacctattggatcactttgctggtgaaggcatgccaaaggacgctatcgaatggtactctaggaacttggattacaacgtgccaggtggtaagttgaatagaggtatgtccgtcgtcgattctgttgaaattattaagggtagagctttaaccgacgaagagtatttgaaatctgcaatcttaggttggtgcattgaattgctacaagccttctttttggtttccgatgacttaatggatagttctgtcacgagaagaggtcaaccatgttggtacagagtagaaaacgttggtctgatctctatctgggacgctttcatgctagaaggtgctatttaccatttgttgaagaaatattttagacaagactcatactacgttgaattattggacttgttccacgatgttacttacaagaccgaaatgggccagttaatcgatttgattaccgcccctgaggatcatgttgatttggacaagttctcgcttaagaaacatcaattgatagtcatttataagactgctttttactctttctacttgccagttgctttagcaatgcacgtctgtggcataccaccatcccctaactcaccatctgatccctacaagctggctcacgaaattctaatcccacttggtgaatatttccaagttcaagacgatttcctagactttggtggtacaccagagcaaatcggtaaaattggtacagatatattagacaacaagtgttcctggtgcatcaatactgcattggctgtggccactttggaacaaaggcgtgtcttggatgaaaactatggtagaaaggacgctgctaaagaagccaaagtgaaggaagtttttgagcaggtcgaaattagaagacgttacgaagaatacgaacaaaccgcatatgaaagaatcaatggattaattgaaacgatccctgctgatgctaaggacggtgagttgaagagagaagttttcaccagcttcttgtccaaaatttacaaaagaactaagggcggaggtggttctggtgggggtggttcgggtggtggtgggtcaggtggtggcggtagcggtggcggtggttccggtggtggtggtagtggaggtgggggttcttcagccgggagcgaccagatagaaggaagtcctcatcacgagtctgataactccattgcgacaaaaatcctgaatttcggtcatacgtgctggaagttacaaaggccctatgtcgtgaaaggtatgatttcgatagcttgtggcttgtttggtcgcgaactatttcataataccaaccttttatcttggtcattgatgctcaaggcattctcatccttaatggtaatcctttcttttaatttctttgctgccataatgaatcaaatttacgatgttgatattgaccgaattaacaaaccagatttgccactcgttagtggagagatgagtatcgaaactgcatggatactatcgatcattgtcgctctgacaggcttaatattgactattaagcttaattgtggtccgctatttatatcattgtattgcgtatctattttcgctggatttgcatacagcgttcctccaattcgttggaaacagtatcctttcaccaacttcttaataactatcagctcacacgtgggtgttaactttacatgttattacgcctccagagcagcctttggcttacccttcgaaatgtctccgccatttacttttattctcgcttttatgaccgtaatgggaatgacaatagctttcgcgaaagacatttcagatatcgaaggtgatgcgaaatatggggtgtctactgttgctacgaagttaggtgcaagaaatatgacgtttgttgtcagtggtgtcttgttgctgacatacgtaagcgctatacttgcagctatcatttggccgcaagcctttaagtcaaatgtgatgttgttatctcatgccatcctggcgttctgcctaattttccaaactagagagctagcgcttgcaaattatgcttctgcacctagtaggcagttttttgaatttatctggaaattgcattatgcagagtacttagtttatgttttcatctaa

SEQ ID NO: 602 - DNA, 2127 bp, Artificial Sequence
  Synthetic
atggataaatccacagctcgtagtaagtttttagacgtgttcccagaacttgtttctgatctggagactgtcaccaaggaatacggtatgcctcaggacgccatcgaatggttcaagagaaacttgaattataacactccaggaggcaaattgaacaggggtttgtcggttgtagatacctacgctttactaaagggttataagagctttgacgacttcgaaccagaggaatacaaaaagactgcaattttgggttgggctgttgaattattgcaagcctacttcttggtcgctgatgatatgatggacaaatcaataacgagaagaggtcaaccttgttggtacagagttgatggtgtgaatgaaattgctatctgggattcttttatgctagaagctgcaatttatgtcttgttaaagaagtacttcagaaaagactcctattacgttgacttgttggagctttttcatgaagtcaccttccaaactgaacttggtcaattgctggatttgctaactgccccagaagatcacgttgatttgtctaagttctctttatccaagcacagtttcatcgtcacatttaagacagcttactactcgttttatttaccagtagccttggctatgtatatggccggtgtttccgacgaaaaggacttgaaacaagctcaagatgttcttatccccttgggtgaatacttccagattcaagacgattatttagactgcttcggtaagccagaagacattggtaaaataggtaccgatatactagataacaagtgttcatgggtcattaatactgctttgaagatctgtaccccagagcaaagagccatcttggatgaaaactacggcaggaaggattcagctaaggaagctaagtgcaagcaaatttttaaggatctaaaaatcgaccaattatatttggaatacgaagaaaaggttgccaccgagttaagatctaaaattgctaacgtggatgaatctcgtggttttaaaggtgaagttttgactagcttcttgaataaaatttacaagagacaaaaaggcggaggtggttctggtgggggtggttcgggtggtggtgggtcaggtggtggcggtagcggtggcggtggttccggtggtggtggtagtggaggtgggggttcttcagccgggagcgaccagatagaaggaagtcctcatcacgagtctgataactccattgcgacaaaaatcctgaatttcggtcatacgtgctggaagttacaaaggccctatgtcgtgaaaggtatgatttcgatagcttgtggcttgtttggtcgcgaactatttcataataccaaccttttatcttggtcattgatgctcaaggcattctcatccttaatggtaatcctttcttttaatttctttgctgccataatgaatcaaatttacgatgttgatattgaccgaattaacaaaccagatttgccactcgttagtggagagatgagtatcgaaactgcatggatactatcgatcattgtcgctctgacaggcttaatattgactattaagcttaattgtggtccgctatttatatcattgtattgcgtatctattttcgctggatttgcatacagcgttcctccaattcgttggaaacagtatcctttcaccaacttcttaataactatcagctcacacgtgggtgttaactttacatgttattacgcctccagagcagcctttggcttacccttcgaaatgtctccgccatttacttttattctcgcttttatgaccgtaatgggaatgacaatagctttcgcgaaagacatttcagatatcgaaggtgatgcgaaatatggggtgtctactgttgctacgaagttaggtgcaagaaatatgacgtttgttgtcagtggtgtcttgttgctgacatacgtaagcgctatacttgcagctatcatttggccgcaagcctttaagtcaaatgtgatgttgttatctcatgccatcctggcgttctgcctaattttccaaactagagagctagcgcttgcaaattatgcttctgcacctagtaggcagttttttgaatttatctggaaattgcattatgcagagtacttagtttatgttttcatctaa

SEQ ID NO: 603 - DNA, 2115 bp, Artificial Sequence
  Synthetic
atggcaacgaggatctcccgtagtgaatttgagggattcgtacaccccctgattaaggacatacttgaagccacagaacagtataacctaccagaaaatgctagaaaatggttctcggattcattgaacgctaacattgtgggtggtaagatgaatagaggtatgtctgtcccagataccggctccatcttattgggtagacctttaactgacgaagaaaagaaacatttgagcttgttgggttggtttactgagttactacaagctttcttcttggtttctgacgatattatggacggttccatcaccagaagaggtcaaccatgttggtacagaagagaaggcgttggtatgattgccatttgggatgcttttatgttggaatctgccatctacgttatactgaagaagtacttcagatctcacccagcttatactgatttgttggaactatttcatgaaaccacttggcaaactgaactgggtcaattatgcgacttgattaccgctcctgaggaccacgtcgatttgaacaacttctcgatggaaaagtacacattcatcgtcaaatacaaaacggcatattacagcttctatctaccagttactttggctttacattaccttcaagttgcaaccccaaagaatttgaagcaatgtgaagatattttgatacctcttggtgagtattttcagatccaagacgactacttagatgctttcggttctccagaaactattggcaaaatcggtacagatattcaagataacaagtgttcttggttggtcaaccgtgctctaaccattgtaactccagaacaaagaaagttgttggacgaagcctacggtcgtaaggactcagctttagaagctaaagtcaaggccttgtataatgatatcaagttagaacaacactacttgaagtttgaagagcagagagttggacaattaaggcaacaaatagaggctgttgatgaatctgaaggtttgaaaaaggaagtttttagtgccttcctggaaaagatctacaagagatccaagggcggaggtggttctggtgggggtggttcgggtggtggtgggtcaggtggtggcggtagcggtggcggtggttccggtggtggtggtagtggaggtgggggttcttcagccgggagcgaccagatagaaggaagtcctcatcacgagtctgataactccattgcgacaaaaatcctgaatttcggtcatacgtgctggaagttacaaaggccctatgtcgtgaaaggtatgatttcgatagcttgtggcttgtttggtcgcgaactatttcataataccaaccttttatcttggtcattgatgctcaaggcattctcatccttaatggtaatcctttcttttaatttctttgctgccataatgaatcaaatttacgatgttgatattgaccgaattaacaaaccagatttgccactcgttagtggagagatgagtatcgaaactgcatggatactatcgatcattgtcgctctgacaggcttaatattgactattaagcttaattgtggtccgctatttatatcattgtattgcgtatctattttcgctggatttgcatacagcgttcctccaattcgttggaaacagtatcctttcaccaacttcttaataactatcagctcacacgtgggtgttaactttacatgttattacgcctccagagcagcctttggcttacccttcgaaatgtctccgccatttacttttattctcgcttttatgaccgtaatgggaatgacaatagctttcgcgaaagacatttcagatatcgaaggtgatgcgaaatatggggtgtctactgttgctacgaagttaggtgcaagaaatatgacgtttgttgtcagtggtgtcttgttgctgacatacgtaagcgctatacttgcagctatcatttggccgcaagcctttaagtcaaatgtgatgttgttatctcatgccatcctggcgttctgcctaattttccaaactagagagctagcgcttgcaaattatgcttctgcacctagtaggcagttttttgaatttatctggaaattgcattatgcagagtacttagtttatgttttcatctaa

SEQ ID NO: 604 - DNA, 2211 bp, Artificial Sequence
  Synthetic
atgggtgccgaccgtcaggcatttgaaggcttcttcccacaagtggttagggatctgacggctgatggtctaagacaccccgaggtaggtgacgctgtcgctagattgaaggaagttcttgaatacaattctcctggaggtaaacataccagaggtttgactgtcttagccgcatttagaagattggttcaaccagaacaacaaggtccagattcagttcgttgtgccttggctgtcggttggtgcatagagttattgcaagctttctttttggtagctgacgacattatggatagctctttaacaagaagaggtcaaccatgttggtataagaaggaaggtatcggcttggacgctgtttgggattccttcctacttgaatcgagtatttacaggttgctgaaaaagtattgtagaggtcagccatactacttacaccttttggaattgttcctgcaaacttcttaccaaaccgaattgggtcaagcattggacttaatcaccgctcctccaactcaagttgatttggccagattcacagaacaaagatataaggctatcgtcaaatacaagactgctttttatagtttctaccttccagtcgccgcagctatgtatatggctggaattgaatctgaagaggaacatgcaaacgccaaagctatattgctagaaatgggcgaatttttccagatccaagatgacttcttagactgttttggtgaccctagcttaaccggtaagattggtactgatatacaagataacaagtgttcctggttggttgtcgaatgcctgagaagagcttccccagagcaaaggaaacttttggaagagaattacggacaaaaggaattggaaaaggtcgccagagttaaagaactatacgaagctttgggtttgagagcagtttaccaggaatatgaagactctagtttccaacacttgcaacaactaattgaagttcatactccacacttacccaaggagatcttcttggatcttgctcatgtgatctacaagcgtcagaacgagcaccgttctgcttcctgttgtccagatgcctgggctagaacgggtagacaacaagtccaaaccgccgctacctggcaaagagttgtcgatgatttgtctggtggcggaggtggttctggtgggggtggttcgggtggtggtgggtcaggtggtggcggtagcggtggcggtggttccggtggtggtggtagtggaggtgggggttcttcagccgggagcgaccagatagaaggaagtcctcatcacgagtctgataactccattgcgacaaaaatcctgaatttcggtcatacgtgctggaagttacaaaggccctatgtcgtgaaaggtatgatttcgatagcttgtggcttgtttggtcgcgaactatttcataataccaaccttttatcttggtcattgatgctcaaggcattctcatccttaatggtaatcctttcttttaatttctttgctgccataatgaatcaaatttacgatgttgatattgaccgaattaacaaaccagatttgccactcgttagtggagagatgagtatcgaaactgcatggatactatcgatcattgtcgctctgacaggcttaatattgactattaagcttaattgtggtccgctatttatatcattgtattgcgtatctattttcgctggatttgcatacagcgttcctccaattcgttggaaacagtatcctttcaccaacttcttaataactatcagctcacacgtgggtgttaactttacatgttattacgcctccagagcagcctttggcttacccttcgaaatgtctccgccatttacttttattctcgcttttatgaccgtaatgggaatgacaatagctttcgcgaaagacatttcagatatcgaaggtgatgcgaaatatggggtgtctactgttgctacgaagttaggtgcaagaaatatgacgtttgttgtcagtggtgtcttgttgctgacatacgtaagcgctatacttgcagctatcatttggccgcaagcctttaagtcaaatgtgatgttgttatctcatgccatcctggcgttctgcctaattttccaaactagagagctagcgcttgcaaattatgcttctgcacctagtaggcagttttttgaatttatctggaaattgcattatgcagagtacttagtttatgttttcatctaa

SEQ ID NO: 605 - DNA, 2115 bp, Artificial Sequence
  Synthetic
atggcctctactacaaagcgtgctgactttgaagcagttttccccggactagctaaagatattttagagcacgctaagagatataacctgcctgccaatgctttggaatggttcgaaaaatccttgtttgctaacaccccaggcggtaagcttaacaggggtttgagtgtaccagacactggtttggccttattgaagaagccactgaccgaagaacagttcgaacatctatcaatattgggttggcttactgagttgttgcaagctttctggttagtctcggatgacatcatggattcctctatcacgagaagaggtcaaccatgttggtacagacaagaaggtgtgggattaattgcaattaatgatgctttcatgttggaatctgcaatctacttgattttgaaacaaagatttagaagccacccagcttacatagatctagttgaactttttcatgaaactacctggcaaacagaattgggtcaattatgcgacttgattaccgctcctgaagaccacgttaacttagacaatttctctatggagaagtatatgtttatcgtcacttacaagacggcttattactcattctatttgccagttgccttagctttgttatacttgcaggttgcaactccagagactcttaaacaagctcatgatattttgatcccactgggtcaatacttccaaatccaggatgattatttggacaactttggcgatccttccgtcattggtaagattggtaccgatatacaagacaacaaatgttcttggttagttaaccaagccatcgctagagctacaccagaacaaagggccgtgttggacagcgcctacggtagaaaggacaaggaacaagaattgaaggtaaaaaagatatttgacgatttggaattagaaaaggtctacaaagaatacgaggaaaaggttgtcggtgaattgcgtgctaagattgctgccgttgacgaaaccactggcctaaagaaagaggttttcgaatcgtttttggctaagatctataaaagaacaaagggcggaggtggttctggtgggggtggttcgggtggtggtgggtcaggtggtggcggtagcggtggcggtggttccggtggtggtggtagtggaggtgggggttcttcagccgggagcgaccagatagaaggaagtcctcatcacgagtctgataactccattgcgacaaaaatcctgaatttcggtcatacgtgctggaagttacaaaggccctatgtcgtgaaaggtatgatttcgatagcttgtggcttgtttggtcgcgaactatttcataataccaaccttttatcttggtcattgatgctcaaggcattctcatccttaatggtaatcctttcttttaatttctttgctgccataatgaatcaaatttacgatgttgatattgaccgaattaacaaaccagatttgccactcgttagtggagagatgagtatcgaaactgcatggatactatcgatcattgtcgctctgacaggcttaatattgactattaagcttaattgtggtccgctatttatatcattgtattgcgtatctattttcgctggatttgcatacagcgttcctccaattcgttggaaacagtatcctttcaccaacttcttaataactatcagctcacacgtgggtgttaactttacatgttattacgcctccagagcagcctttggcttacccttcgaaatgtctccgccatttacttttattctcgcttttatgaccgtaatgggaatgacaatagctttcgcgaaagacatttcagatatcgaaggtgatgcgaaatatggggtgtctactgttgctacgaagttaggtgcaagaaatatgacgtttgttgtcagtggtgtcttgttgctgacatacgtaagcgctatacttgcagctatcatttggccgcaagcctttaagtcaaatgtgatgttgttatctcatgccatcctggcgttctgcctaattttccaaactagagagctagcgcttgcaaattatgcttctgcacctagtaggcagttttttgaatttatctggaaattgcattatgcagagtacttagtttatgttttcatctaa

SEQ ID NO: 606 - DNA, 2133 bp, Artificial Sequence
  Synthetic
atgtctgccgcactgacaaatggtcaggatcgtagagctaggttcaccgctgtctttccaaagttagagaaagaactacttgacttcgttacggctcaaggctttcctcaagaagccatcagctggttccaaagaaacttggattataacgctccaggtggtaagttgaatagaggaatgtccgtggttgactcattggaaatattaagaggtggtcccttgagtgaagaggaatactttaaatcggctttgttgggttggtgtgtagaattgttacaagccttctttttagtcagtgacgatattatggactcttctatcactagacgtggtcaaccatgctggtacagagttgaaggcattggtatgattgctatctgggattccttcatgcttgaaggttctatttatcatttgctgaagtcccacttcagaaaggattcttactacgttgatttgttggacttgtttcacgagactaccttccaaaccgaactaggtcagttaattgaccttatcactgcaccagaagaccatatagatttgaacagattctcattgaggaaacaccaactaattgtcatctacaagactgcttattactcattttatttgcctgttgcattagctatgcatatggcaggtatcaaggacgaagctgctttcaagcacgcccaagatatcttgattccattaggtgaatacttccaagtccaagatgattacctggactgttatggcgctccagaatttattggtaaaataggtactgacattttagataataagtgttcgtggaacgtcaacgttgctttggccaactgttctcccgaacagagaaaggttttggacgaaaattacggtagaaaggacgctgcctgcgaggccaaggttaaagaagtgtttctggctgtcgatatcccaggaaaatatgctgtatacgagcaagaaagctatgaaaagattaacggtttaattaacgctatcgatgaaacccctggaggtttgaagagagatgttttcagagctttcttagccaagatctacaaacgtacaaagggcggaggtggttctggtgggggtggttcgggtggtggtgggtcaggtggtggcggtagcggtggcggtggttccggtggtggtggtagtggaggtgggggttcttcagccgggagcgaccagatagaaggaagtcctcatcacgagtctgataactccattgcgacaaaaatcctgaatttcggtcatacgtgctggaagttacaaaggccctatgtcgtgaaaggtatgatttcgatagcttgtggcttgtttggtcgcgaactatttcataataccaaccttttatcttggtcattgatgctcaaggcattctcatccttaatggtaatcctttcttttaatttctttgctgccataatgaatcaaatttacgatgttgatattgaccgaattaacaaaccagatttgccactcgttagtggagagatgagtatcgaaactgcatggatactatcgatcattgtcgctctgacaggcttaatattgactattaagcttaattgtggtccgctatttatatcattgtattgcgtatctattttcgctggatttgcatacagcgttcctccaattcgttggaaacagtatcctttcaccaacttcttaataactatcagctcacacgtgggtgttaactttacatgttattacgcctccagagcagcctttggcttacccttcgaaatgtctccgccatttacttttattctcgcttttatgaccgtaatgggaatgacaatagctttcgcgaaagacatttcagatatcgaaggtgatgcgaaatatggggtgtctactgttgctacgaagttaggtgcaagaaatatgacgtttgttgtcagtggtgtcttgttgctgacatacgtaagcgctatacttgcagctatcatttggccgcaagcctttaagtcaaatgtgatgttgttatctcatgccatcctggcgttctgcctaattttccaaactagagagctagcgcttgcaaattatgcttctgcacctagtaggcagttttttgaatttatctggaaattgcattatgcagagtacttagtttatgttttcatctaa

SEQ ID NO: 607 - DNA, 2136 bp, Artificial Sequence
  Synthetic
atggtagccgctaccaatagtttgtcaaaagaagataagagagctaagttcgaggcagtttttccaattttagttgacgaaatagtggattatctaacaagcgtcaacgtccctcaagacgctaaggattggttcaaaaagtctctttaccataacactttgggtggaaagtacaataggggcttgtctgttatcgacacttacgaaattctgtcgggtaaagccttggacgataactcttattttcgtgctgccttattgggttggtgcatcgaattgcttcaggctttctggttagtcgctgatgacatgatggatgaatccaagacgagaagaggtcaaccatgttggtacttaatgcccaacgttggttccattgctattaacgattcattcatgttggaaagtgctatctactttttgttaaagaagcacttcagacacgaaacctattacgttgacctgcttgatttgttccatgaggtcacttttcaaactaccctaggtcaagaattggatttgttgaccgccccagaaaatcacgtagacctgtccaagttctctcaagacaaacacgctttcattgttatctttaagacagcctactattctttttacttgccagtggcactagcaatgtgtatggctaacgtcgctactccagataatttgcaacgtgcttcggatgtcttgattcctttgggtaaatattttcaaatccaggacgattacttagactgttatggcgatccatctgttacaggtaaggttggtactgacatactggataacaaatgttcctggctaatcaatgtggcattggctaaggcctcacccgagcaaagaaaggttttagacgaaaattacggtagaaaggacgccgattgcgaaaaaagagttaaggctgtcttcgaagaattgaacttaaagaaggcttacgaagaatacgaagagtctgaggtatccaccataaaacaaagaatttctgttctggatgaatccgccggtttgaagaaagaagctttcactacctttttaaacaagatttataagagaagtaaaggcggaggtggttctggtgggggtggttcgggtggtggtgggtcaggtggtggcggtagcggtggcggtggttccggtggtggtggtagtggaggtgggggttcttcagccgggagcgaccagatagaaggaagtcctcatcacgagtctgataactccattgcgacaaaaatcctgaatttcggtcatacgtgctggaagttacaaaggccctatgtcgtgaaaggtatgatttcgatagcttgtggcttgtttggtcgcgaactatttcataataccaaccttttatcttggtcattgatgctcaaggcattctcatccttaatggtaatcctttcttttaatttctttgctgccataatgaatcaaatttacgatgttgatattgaccgaattaacaaaccagatttgccactcgttagtggagagatgagtatcgaaactgcatggatactatcgatcattgtcgctctgacaggcttaatattgactattaagcttaattgtggtccgctatttatatcattgtattgcgtatctattttcgctggatttgcatacagcgttcctccaattcgttggaaacagtatcctttcaccaacttcttaataactatcagctcacacgtgggtgttaactttacatgttattacgcctccagagcagcctttggcttacccttcgaaatgtctccgccatttacttttattctcgcttttatgaccgtaatgggaatgacaatagctttcgcgaaagacatttcagatatcgaaggtgatgcgaaatatggggtgtctactgttgctacgaagttaggtgcaagaaatatgacgtttgttgtcagtggtgtcttgttgctgacatacgtaagcgctatacttgcagctatcatttggccgcaagcctttaagtcaaatgtgatgttgttatctcatgccatcctggcgttctgcctaattttccaaactagagagctagcgcttgcaaattatgcttctgcacctagtaggcagttttttgaatttatctggaaattgcattatgcagagtacttagtttatgttttcatctaa

SEQ ID NO: 608 - DNA, 2121 bp, Artificial Sequence
  Synthetic
atggcagataaggccgctgtaaaacagaagtttatcgactcattcgatccattagtcgaggacttgcttgctgtgttgaagcaatacaacataagtcccgaagctactgaatggttcaaaaagtccctatattacaatggtgttggcggtaagttgaacagaggtttatcggtcattgatacctatcaaattttgacaggtaaaaatgaactgacggacgaagaatacaagaaggccgctgttttgggatggggtatcgaactattgcaaggttttttcttagtttctgacgatattatggatgcttctaaaactaggcgtggtcaaccttgctggtacttggttccaaaggtcggtatgatcgcaatttgggacgcctttatgctagagactgctatttatttcttgcttaagaaatacttcagaagcgaaccttactatattgacttagttgaattgtttcacgatgttaccttccaaaccgaattgggccagctgttggacttgatcactgctccagaggatgaagtcgatttgtctaagttctccctagccaagcattcatttatcgtaatatacaaaacagcttactattctttttacttaccagtcgccttagctatgtatatggccggtgtttccaagccagaagacttgaagcaagctcacgacgtattaataccattgggtgaatacttccaaatccaagatgactacctggattgttatggtgatcccgcattcattggcaagatcggtaccgatatcctggacaacaaatgttcttggttgattaatactgctcttaaaaaggctaacccagaacaaagaaagattttggacgaaaactacggtcagaagaacggagcttgtgaggcaaaagttaaagctgtctacaacgaattggatttggaaaatgaatacttcaagtatgaagaagatgccgttggacgtatcaagactctgattgacaacgttgatgaatccagaggttttaagaaggacgtgcttagtgcttttttggctaagatatacaagagacaaaagggcggaggtggttctggtgggggtggttcgggtggtggtgggtcaggtggtggcggtagcggtggcggtggttccggtggtggtggtagtggaggtgggggttcttcagccgggagcgaccagatagaaggaagtcctcatcacgagtctgataactccattgcgacaaaaatcctgaatttcggtcatacgtgctggaagttacaaaggccctatgtcgtgaaaggtatgatttcgatagcttgtggcttgtttggtcgcgaactatttcataataccaaccttttatcttggtcattgatgctcaaggcattctcatccttaatggtaatcctttcttttaatttctttgctgccataatgaatcaaatttacgatgttgatattgaccgaattaacaaaccagatttgccactcgttagtggagagatgagtatcgaaactgcatggatactatcgatcattgtcgctctgacaggcttaatattgactattaagcttaattgtggtccgctatttatatcattgtattgcgtatctattttcgctggatttgcatacagcgttcctccaattcgttggaaacagtatcctttcaccaacttcttaataactatcagctcacacgtgggtgttaactttacatgttattacgcctccagagcagcctttggcttacccttcgaaatgtctccgccatttacttttattctcgcttttatgaccgtaatgggaatgacaatagctttcgcgaaagacatttcagatatcgaaggtgatgcgaaatatggggtgtctactgttgctacgaagttaggtgcaagaaatatgacgtttgttgtcagtggtgtcttgttgctgacatacgtaagcgctatacttgcagctatcatttggccgcaagcctttaagtcaaatgtgatgttgttatctcatgccatcctggcgttctgcctaattttccaaactagagagctagcgcttgcaaattatgcttctgcacctagtaggcagttttttgaatttatctggaaattgcattatgcagagtacttagtttatgttttcatctaa

SEQ ID NO: 609 - DNA, 2112 bp, Artificial Sequence
  Synthetic
atgacttcgaagagtgaattggagctattcttatccctgtacgaaccattgaaagctcaaatagttagcgacttggaaaactttgaagcaaatcaggagatggtggaaagaatcaagttagtaatggattattctattttgggtggcaagatgaaccgtggaatttctgttctttcaacagtcaaactaatcaagggtgaatctattaccaaagatttgcaagaaaaggccatcattttaggttggtgtatcgaatggttgcaagctttctttttggtcgctgacgatattatggacgattcccctatgagaagaggtaagcccgcctggtacaggaacgataatgttggtatgatcgcaatctgggactctttcttaattgaatccttcatatttagaatattgaaaattcacttcagacaacaatcatattacatcgatttgattgaactttttcacgaggtcatctaccaaacggaattaggtcagatgttggacctgattacctctccaactagcgttaacttggatttgttcaatttggacaagcatcattttatcgttaagtataagacttctttctacagtttttatcttccagtggctttggctcttctagcttgcggtgaaacacctgactccaaatcgttcgatatctctcgtgatattttggtcccaatgggtgtttacttccaagttcaagatgactacttagatctatatggagatgtcaagttgactggtaaagtcggtaccgacatcaaggacaacaagtgttcctggttagttattaaggccttatccaagtgtaatccagaacaaagaaaaattttggacttgcactacggtaagaaatccgatgaagacgaggctatcgttaagaagctgtaccaagaattggatgttcagggcatgttcttggaatacgccaacgaaaccgaggctcatttgaacaacatgataagcaatgtcgacaagtccgaaattaatccacaaattttctattcttttttgaacaagatatctcacagacaaaaaggcggaggtggttctggtgggggtggttcgggtggtggtgggtcaggtggtggcggtagcggtggcggtggttccggtggtggtggtagtggaggtgggggttcttcagccgggagcgaccagatagaaggaagtcctcatcacgagtctgataactccattgcgacaaaaatcctgaatttcggtcatacgtgctggaagttacaaaggccctatgtcgtgaaaggtatgatttcgatagcttgtggcttgtttggtcgcgaactatttcataataccaaccttttatcttggtcattgatgctcaaggcattctcatccttaatggtaatcctttcttttaatttctttgctgccataatgaatcaaatttacgatgttgatattgaccgaattaacaaaccagatttgccactcgttagtggagagatgagtatcgaaactgcatggatactatcgatcattgtcgctctgacaggcttaatattgactattaagcttaattgtggtccgctatttatatcattgtattgcgtatctattttcgctggatttgcatacagcgttcctccaattcgttggaaacagtatcctttcaccaacttcttaataactatcagctcacacgtgggtgttaactttacatgttattacgcctccagagcagcctttggcttacccttcgaaatgtctccgccatttacttttattctcgcttttatgaccgtaatgggaatgacaatagctttcgcgaaagacatttcagatatcgaaggtgatgcgaaatatggggtgtctactgttgctacgaagttaggtgcaagaaatatgacgtttgttgtcagtggtgtcttgttgctgacatacgtaagcgctatacttgcagctatcatttggccgcaagcctttaagtcaaatgtgatgttgttatctcatgccatcctggcgttctgcctaattttccaaactagagagctagcgcttgcaaattatgcttctgcacctagtaggcagttttttgaatttatctggaaattgcattatgcagagtacttagtttatgttttcatctaa

SEQ ID NO: 610 - DNA, 2130 bp, Artificial Sequence
  Synthetic
atggccagtgagaaagaaataagacgtgaaagattcttaaatgtttttccaaagcttgtcgaagaactaaacgcatctctgttggcttatggtatgcctaaggaagcttgcgactggtacgctcattccttgaactacaatacaccaggcggtaaattgaacagaggattatcagtagtcgatacctatgccatcttgtctaacaagacggttgaacagttgggtcaagaagagtacgaaaaggtggctattttgggttggtgtattgagcttttacaagcttacttcttggttgctgatgacatgatggataaatcaatcactagaaggggtcaaccatgttggtacaaggttcctgaagtaggtgaaattgccatctgggacgcctttatgttggaagctgcaatttataagctactaaagtcgcacttcagaaatgaaaaatactatatcgatattaccgagttgttccacgaagtcacttttcaaactgaacttggtcaattaatggacttgataaccgctccagaagacaaggttgatctatctaagttttccttgaagaagcattctttcattgtcactttcaagacagcttactattccttttacttacccgttgccctggctatgtatgtcgccggcatcaccgatgaaaaagacttgaaacaagctcgtgatgttttgattccattgggtgagtacttccagatccaagacgattacttagactgtttcggtactccagaacaaatcggtaagatcggtacagacattcaagataacaagtgcagctgggttattaataaagctcttgaattggcttccgccgaacagaggaagactttggacgaaaactatggtaagaaggattctgtagctgaagctaaatgtaagaaaatcttcaatgatctaaaaattgagcaattgtaccacgaatacgaagaatctatcgccaaggatcttaaggcaaaaatttctcaagtcgacgagagtagaggctttaaggctgatgtgttaaccgcattcttgaacaaggtgtacaaaagatccaagggcggaggtggttctggtgggggtggttcgggtggtggtgggtcaggtggtggcggtagcggtggcggtggttccggtggtggtggtagtggaggtgggggttcttcagccgggagcgaccagatagaaggaagtcctcatcacgagtctgataactccattgcgacaaaaatcctgaatttcggtcatacgtgctggaagttacaaaggccctatgtcgtgaaaggtatgatttcgatagcttgtggcttgtttggtcgcgaactatttcataataccaaccttttatcttggtcattgatgctcaaggcattctcatccttaatggtaatcctttcttttaatttctttgctgccataatgaatcaaatttacgatgttgatattgaccgaattaacaaaccagatttgccactcgttagtggagagatgagtatcgaaactgcatggatactatcgatcattgtcgctctgacaggcttaatattgactattaagcttaattgtggtccgctatttatatcattgtattgcgtatctattttcgctggatttgcatacagcgttcctccaattcgttggaaacagtatcctttcaccaacttcttaataactatcagctcacacgtgggtgttaactttacatgttattacgcctccagagcagcctttggcttacccttcgaaatgtctccgccatttacttttattctcgcttttatgaccgtaatgggaatgacaatagctttcgcgaaagacatttcagatatcgaaggtgatgcgaaatatggggtgtctactgttgctacgaagttaggtgcaagaaatatgacgtttgttgtcagtggtgtcttgttgctgacatacgtaagcgctatacttgcagctatcatttggccgcaagcctttaagtcaaatgtgatgttgttatctcatgccatcctggcgttctgcctaattttccaaactagagagctagcgcttgcaaattatgcttctgcacctagtaggcagttttttgaatttatctggaaattgcattatgcagagtacttagtttatgttttcatctaa

SEQ ID NO: 611 - DNA, 2115 bp, Artificial Sequence
  Synthetic
atggctaaaagcgcagctttggagaagtttgaatctattttccccacgctggttgaagatgtcttagcccactccaagagttacaatctaccacagcaagccttggactggttcaaaaactctcttaacgctaacgctatcggcggtaagtgcaatcgtggaatgtcagtaccagactccgtggctttgatgacaggtaaagaattgtctgaagatgagtattttcatgccgcaactttaggttggatgactgaattgttgcaagctttctggttagtctcggacgatataatggattctagcattaccagaagaggtgctccttgttggtacagacaaccagaagttggtatgattgctatcaacgatgccttcatgttagaagctgctatctatattttgttgaagaagtactttaggcaacacaagtcctacgttgacctacttgaattgttccacgaagtcacctttcaaactgaattaggtcaaacctgtgacctattgactgctccagaggataaagttgacctggacaatttctccatggaaaagtatactttcatagtgatctacaagaccgcctattacagtttctacttgcctgttgctttagccctacatcagttaggtattgctacagaaaagaacttgaaacaagctgaagatattttgatcccactgggtacttattttcaaatacaagacgattacttggataacttcggtaatccagaacacatcggaaagattggcactgacatcttggataacaagtgttcttggcttgtcaataaggctttgcttattgccaccccagagcaacgtaaagttttagaagaaaactatggtagaaagaataaggataacgaagcagttgtcaagaaattgtacgatgaattagctttggaaaaattgtaccaggagtacgaagaggctgaagtcggtaaaattagaaagttaatcgaagaagttgacgagtctgaaggtcttaagaagtcagttttcgaatcctttttgggtaagatctataaaagaaccaagggcggaggtggttctggtgggggtggttcgggtggtggtgggtcaggtggtggcggtagcggtggcggtggttccggtggtggtggtagtggaggtgggggttcttcagccgggagcgaccagatagaaggaagtcctcatcacgagtctgataactccattgcgacaaaaatcctgaatttcggtcatacgtgctggaagttacaaaggccctatgtcgtgaaaggtatgatttcgatagcttgtggcttgtttggtcgcgaactatttcataataccaaccttttatcttggtcattgatgctcaaggcattctcatccttaatggtaatcctttcttttaatttctttgctgccataatgaatcaaatttacgatgttgatattgaccgaattaacaaaccagatttgccactcgttagtggagagatgagtatcgaaactgcatggatactatcgatcattgtcgctctgacaggcttaatattgactattaagcttaattgtggtccgctatttatatcattgtattgcgtatctattttcgctggatttgcatacagcgttcctccaattcgttggaaacagtatcctttcaccaacttcttaataactatcagctcacacgtgggtgttaactttacatgttattacgcctccagagcagcctttggcttacccttcgaaatgtctccgccatttacttttattctcgcttttatgaccgtaatgggaatgacaatagctttcgcgaaagacatttcagatatcgaaggtgatgcgaaatatggggtgtctactgttgctacgaagttaggtgcaagaaatatgacgtttgttgtcagtggtgtcttgttgctgacatacgtaagcgctatacttgcagctatcatttggccgcaagcctttaagtcaaatgtgatgttgttatctcatgccatcctggcgttctgcctaattttccaaactagagagctagcgcttgcaaattatgcttctgcacctagtaggcagttttttgaatttatctggaaattgcattatgcagagtacttagtttatgttttcatctaa

SEQ ID NO: 612 - DNA, 2115 bp, Artificial Sequence
  Synthetic
atgggtaaaaccactttaaaggagtttgaagcagtcttcccacttctagtggacgaaattatggccgttctggaaggatacaagatctcatcggaagctgctgcttggtatagaaaggtcttggaacacaacacagttggtggtaagtgtaatcgtggtatgtctgtagttgatacttactccacgttgaccaaccaagataaattgagcgacgaagactatttgaggtctgccatattaggctggtgcactgaattgttacaggctttctttttggttagtgatgatattatggacggttccaagaccagaagaggttccccttgttggtacttgcatgaaggtgtaggcaatatcgccatttgggatgctttcatgttggagtctgctatctacatattactaaagaaacacttcagaaacactccatactatattgacctaatcgaactttttcatgatgtttctttccaaacagaattgggtcaattgctggacttgattaccgctcccgaagacagagtcgatttgtcaaagttttctttggaaaagcactcattcatcgtcattttcaaaactgcctactatagcttctaccttccagtagccttagctatgtatatggctggtgttgctactccagaaaatttaaagcaagcacatgatgttttaattccattgggtgaatactttcaaatccaggatgactatttggactgttacggtgaccctgaacacatcggaaagataggtaccgatattaaagataacaaatgcggttggctaataaaccaagctttggctattgcaacgccagaacaaagacaagtccttgatgataactacggcaagaaggatgacgtcgccgaggctagagttaagaaagtttttctggacttggaattggagaaacgttaccaagattacgaggaaactgtggttggtaagattagaactcttatcgaaggtattgacgaaaccaccggatttaagaaggacgtcctgactaatttcttgaacaaaatctataagagatctaagggcggaggtggttctggtgggggtggttcgggtggtggtgggtcaggtggtggcggtagcggtggcggtggttccggtggtggtggtagtggaggtgggggttcttcagccgggagcgaccagatagaaggaagtcctcatcacgagtctgataactccattgcgacaaaaatcctgaatttcggtcatacgtgctggaagttacaaaggccctatgtcgtgaaaggtatgatttcgatagcttgtggcttgtttggtcgcgaactatttcataataccaaccttttatcttggtcattgatgctcaaggcattctcatccttaatggtaatcctttcttttaatttctttgctgccataatgaatcaaatttacgatgttgatattgaccgaattaacaaaccagatttgccactcgttagtggagagatgagtatcgaaactgcatggatactatcgatcattgtcgctctgacaggcttaatattgactattaagcttaattgtggtccgctatttatatcattgtattgcgtatctattttcgctggatttgcatacagcgttcctccaattcgttggaaacagtatcctttcaccaacttcttaataactatcagctcacacgtgggtgttaactttacatgttattacgcctccagagcagcctttggcttacccttcgaaatgtctccgccatttacttttattctcgcttttatgaccgtaatgggaatgacaatagctttcgcgaaagacatttcagatatcgaaggtgatgcgaaatatggggtgtctactgttgctacgaagttaggtgcaagaaatatgacgtttgttgtcagtggtgtcttgttgctgacatacgtaagcgctatacttgcagctatcatttggccgcaagcctttaagtcaaatgtgatgttgttatctcatgccatcctggcgttctgcctaattttccaaactagagagctagcgcttgcaaattatgcttctgcacctagtaggcagttttttgaatttatctggaaattgcattatgcagagtacttagtttatgttttcatctaa

SEQ ID NO: 613 - DNA, 2127 bp, Artificial Sequence
  Synthetic
atgtctgccgaggataaaagaaacaagttcctaggtgtttttcctgcattggtagacgaattaaagagcatcttgtcaggctacggtatgacagaagacgctctgaagtggtatgaagattctttaaattacaacactccaggtggaaaattgaataggggtttgtcggtggtcgacacctacgctatattgaagggtaaaaagtcttatgctgatttgtccgatgaagaatacttcaagcttgccattcttggttggtgcattgaattattgcaagcttattggttagtcgctgacgatatgatggataaaagtatcactcgtagaggtcagccatgttggtacagagttcccgaggttggtgaaattgccataaacgacgcttttatgctggaaggtgccatctactgtctattgaagaagcatttcagatccgaatcatattacgttgatttgttggagttattccacgacgtcacctttcaaacggaacttggtcaactgttggacttaattactgctccagaagatagagttgatttggataagttctccttagaacgtcactcttttatcgttagattcaagaccgcatactattctttctacttgccagtcgctcttgctatgtacgccgctggtattaacagtgagcatgacttgcaacaagcccaagcagtattgatcccattaggcgaatactttcagattcaagatgactttttggattgtttcggtaaacctgaagatattggaaaaatcggtaccgacattcaagataacaagtgttcatgggttatcaatactgcacttaagttgtgttctgctgaccaaagaaaggtcttggacgaaaattatggtagaaaagacgctgaatctgaagctagatgcaagcacgtgttccacgatttgaagatagattctttgtatttggagtacgaagaaaagactgcccatgacctaagaaacttaatacaaaacacagacgaaagcaggggcttcaaagctcaagttttaaccgctttcctagaaaaggtatacaagcgtaaaaagggcggaggtggttctggtgggggtggttcgggtggtggtgggtcaggtggtggcggtagcggtggcggtggttccggtggtggtggtagtggaggtgggggttcttcagccgggagcgaccagatagaaggaagtcctcatcacgagtctgataactccattgcgacaaaaatcctgaatttcggtcatacgtgctggaagttacaaaggccctatgtcgtgaaaggtatgatttcgatagcttgtggcttgtttggtcgcgaactatttcataataccaaccttttatcttggtcattgatgctcaaggcattctcatccttaatggtaatcctttcttttaatttctttgctgccataatgaatcaaatttacgatgttgatattgaccgaattaacaaaccagatttgccactcgttagtggagagatgagtatcgaaactgcatggatactatcgatcattgtcgctctgacaggcttaatattgactattaagcttaattgtggtccgctatttatatcattgtattgcgtatctattttcgctggatttgcatacagcgttcctccaattcgttggaaacagtatcctttcaccaacttcttaataactatcagctcacacgtgggtgttaactttacatgttattacgcctccagagcagcctttggcttacccttcgaaatgtctccgccatttacttttattctcgcttttatgaccgtaatgggaatgacaatagctttcgcgaaagacatttcagatatcgaaggtgatgcgaaatatggggtgtctactgttgctacgaagttaggtgcaagaaatatgacgtttgttgtcagtggtgtcttgttgctgacatacgtaagcgctatacttgcagctatcatttggccgcaagcctttaagtcaaatgtgatgttgttatctcatgccatcctggcgttctgcctaattttccaaactagagagctagcgcttgcaaattatgcttctgcacctagtaggcagttttttgaatttatctggaaattgcattatgcagagtacttagtttatgttttcatctaa

SEQ ID NO: 614 - DNA, 2115 bp, Artificial Sequence
  Synthetic
atgccaacgacaatcaaggagttcgaaagtgtgtggcccagaattgttgccgatttacaggaccattgcaaacaatataagctacctcaacaatccttggattggtttactaaatcgctggactacaacaccgtcggtggaaagtgtaatcgtggtatgtcagttatagacaccactagcatcttgcaaggcaagactttggatccatcctctgaagaatacttcagagctgcacttttgggttggatgattgaattattacaagcttttttcttggtcagtgacgatattatggattcttctaagacaagaaggggtagcccatgttggtatttggctcctaaggtaggtatgatcgccatttgggacgcttttatgttggaatcttccatctacgttctattaaaaaagcacttcagacaagaaacctcttacgttgacatcgttgagttgttccacgaagtcacttttcagaccgaatgtggtcaattatgtgatcttcttactgctccagaagacgatgttaacttggacaatttctcgttggataaattcacctttattgtcatctataagacggcctactactcattctatctgccagttgctctagctttgtactatgcaggagccgctacgccaaagaacctgaaaactgctgaagatattttggtgccaatgggtgagtactttcaagcacaagatgactatttggatgcttttgccgacccttctgtcttaggtaagataggtactgacattatggataataagtgttcttggttggttaaccaagctttgaagaaggttaacccagaacaaagaaaattgttagatgaaaactacggtcaaaaggattcacaaaaagaagctaaggttaaggaactttaccatgaattgaagcttaaggaattttatgaacagtgggaagaagatagagtagccgatttgcgtgcaaagatcgctcaagtcgacgagtccgagggtttgaaaaaggatatattcgagctattcctacaaaaaatttacaagagatctaaaggcggaggtggttctggtgggggtggttcgggtggtggtgggtcaggtggtggcggtagcggtggcggtggttccggtggtggtggtagtggaggtgggggttcttcagccgggagcgaccagatagaaggaagtcctcatcacgagtctgataactccattgcgacaaaaatcctgaatttcggtcatacgtgctggaagttacaaaggccctatgtcgtgaaaggtatgatttcgatagcttgtggcttgtttggtcgcgaactatttcataataccaaccttttatcttggtcattgatgctcaaggcattctcatccttaatggtaatcctttcttttaatttctttgctgccataatgaatcaaatttacgatgttgatattgaccgaattaacaaaccagatttgccactcgttagtggagagatgagtatcgaaactgcatggatactatcgatcattgtcgctctgacaggcttaatattgactattaagcttaattgtggtccgctatttatatcattgtattgcgtatctattttcgctggatttgcatacagcgttcctccaattcgttggaaacagtatcctttcaccaacttcttaataactatcagctcacacgtgggtgttaactttacatgttattacgcctccagagcagcctttggcttacccttcgaaatgtctccgccatttacttttattctcgcttttatgaccgtaatgggaatgacaatagctttcgcgaaagacatttcagatatcgaaggtgatgcgaaatatggggtgtctactgttgctacgaagttaggtgcaagaaatatgacgtttgttgtcagtggtgtcttgttgctgacatacgtaagcgctatacttgcagctatcatttggccgcaagcctttaagtcaaatgtgatgttgttatctcatgccatcctggcgttctgcctaattttccaaactagagagctagcgcttgcaaattatgcttctgcacctagtaggcagttttttgaatttatctggaaattgcattatgcagagtacttagtttatgttttcatctaa

SEQ ID NO: 615 - DNA, 2115 bp, Artificial Sequence
  Synthetic
atggcctcaacaactaagcgtgctgatttcgaggcagtctttccaggcttggctaaagacatactagaacatgctaagaggtataacttacctgccaatgctctggaatggttcgaaaagtccttgtttgtaaacaccccaggtggtaaacttaacagaggattatcggtgcccgacacgggtttggctttgctacagaagccattgaccgatgaacaattcgagcacttgagtattttaggttggttgactgaattgttgcaagctttctggctagtttctgatgacatcatggactcctcaatcactagaagaggtcaaccatgttggtacagacacgaaggtgttggtttaattgcaatcaatgatgcttttatgctggaaagcgccatttacttgatattaaaacaaagattcaagtctcatccttcttacattgatttggttgaactatttcacgagactacctggcaaaccgaattaggtcaattgtgcgacttgatcacagctccagaagataatgtcaaccttgacaacttctctatggaaaaatatatgttcattgtcacatacaagactgcctactattccttttacttgccagttgctttggcattattataccttcaggttgctacgcccgaaacccttaaacaagcccacgatatcttgattcctttgggtcaatatttccaaatccaggacgattatttggataactttggtgacccatcagtcatcggcaagattggaactgatatacaagataataagtgttcttggttggtaaatcaggctattgctcgtgccactccagaacaaagagctgtattggactcggcttacggtagaaaggacaaggtgcaagaagcaaaggtcaagaaaattttcgatgaactggaattggagaaggtttataaagagtacgaagaaaaggttgtcggtgaactaagagccaagatagctgctgtcgacgaaaccactggtttaaagaaggaggtttttgaatcttttcttgccaaaatctacaagagaacgaagggcggaggtggttctggtgggggtggttcgggtggtggtgggtcaggtggtggcggtagcggtggcggtggttccggtggtggtggtagtggaggtgggggttcttcagccgggagcgaccagatagaaggaagtcctcatcacgagtctgataactccattgcgacaaaaatcctgaatttcggtcatacgtgctggaagttacaaaggccctatgtcgtgaaaggtatgatttcgatagcttgtggcttgtttggtcgcgaactatttcataataccaaccttttatcttggtcattgatgctcaaggcattctcatccttaatggtaatcctttcttttaatttctttgctgccataatgaatcaaatttacgatgttgatattgaccgaattaacaaaccagatttgccactcgttagtggagagatgagtatcgaaactgcatggatactatcgatcattgtcgctctgacaggcttaatattgactattaagcttaattgtggtccgctatttatatcattgtattgcgtatctattttcgctggatttgcatacagcgttcctccaattcgttggaaacagtatcctttcaccaacttcttaataactatcagctcacacgtgggtgttaactttacatgttattacgcctccagagcagcctttggcttacccttcgaaatgtctccgccatttacttttattctcgcttttatgaccgtaatgggaatgacaatagctttcgcgaaagacatttcagatatcgaaggtgatgcgaaatatggggtgtctactgttgctacgaagttaggtgcaagaaatatgacgtttgttgtcagtggtgtcttgttgctgacatacgtaagcgctatacttgcagctatcatttggccgcaagcctttaagtcaaatgtgatgttgttatctcatgccatcctggcgttctgcctaattttccaaactagagagctagcgcttgcaaattatgcttctgcacctagtaggcagttttttgaatttatctggaaattgcattatgcagagtacttagtttatgttttcatctaa

SEQ ID NO: 616 - DNA, 2112 bp, Artificial Sequence
  Synthetic
atgacaaccacgcagagggctgatttcgaggccgtgtttccttcattggcacaagaccttttagatcacgctaagaaatataacctaccagacaatgctctggaatggttcaacaatgctttgcatgtaaacgttccaggtggaaagttgaatagaggtttgagcgttccagatactggtttagccttgttacaaaagcccttgactgacgaacaatttaaacacttatccaccttgggctggctgactgaattattgcaagctttctttcttgtctctgatgacatcatggattcttccattaccagaagaggtcaaccatgttggtaccgtcatcaaggcgttggtttgatagctatttgggacgcattcatgttggaatcgggtatttacgtcatcctaaagaaacacttcagaagtcaccctgcctatatcgatttggtcgagctatttcatgaaactgcatggcagaccgaactgggtcaattgtgcgacttgatcacagctcctgaagaccacgtagatttggataacttctctatggaaaagtacatgttcatagttacttataagactgcttactacagtttttatttaccagtcgctctagctttgcattacctacaattggctacgccagaaaacttgaagcaaacacacgatattctgattccattaggacaatacttccaggttcaagacgattacttggatgcttatggtgacccagccgttattggtaaaattggtaccgacatcaaggacaataagtgttcttggatcatcaaccaagctttgcaattagcctccgctgaacagagaaagactcttgatgccgcctacggtagaaaagatgatgagttggaagccaaggttaaggttatttacagagaattaaacctagaaaaagtctatcaagactatgaagagaaggtggttggcgaaatcagaactaagattggtgctttggatgaatctcaaggtctaaagaaaggtgtttttgaggctttcttgtccaagatatacaagcgttcaaagggcggaggtggttctggtgggggtggttcgggtggtggtgggtcaggtggtggcggtagcggtggcggtggttccggtggtggtggtagtggaggtgggggttcttcagccgggagcgaccagatagaaggaagtcctcatcacgagtctgataactccattgcgacaaaaatcctgaatttcggtcatacgtgctggaagttacaaaggccctatgtcgtgaaaggtatgatttcgatagcttgtggcttgtttggtcgcgaactatttcataataccaaccttttatcttggtcattgatgctcaaggcattctcatccttaatggtaatcctttcttttaatttctttgctgccataatgaatcaaatttacgatgttgatattgaccgaattaacaaaccagatttgccactcgttagtggagagatgagtatcgaaactgcatggatactatcgatcattgtcgctctgacaggcttaatattgactattaagcttaattgtggtccgctatttatatcattgtattgcgtatctattttcgctggatttgcatacagcgttcctccaattcgttggaaacagtatcctttcaccaacttcttaataactatcagctcacacgtgggtgttaactttacatgttattacgcctccagagcagcctttggcttacccttcgaaatgtctccgccatttacttttattctcgcttttatgaccgtaatgggaatgacaatagctttcgcgaaagacatttcagatatcgaaggtgatgcgaaatatggggtgtctactgttgctacgaagttaggtgcaagaaatatgacgtttgttgtcagtggtgtcttgttgctgacatacgtaagcgctatacttgcagctatcatttggccgcaagcctttaagtcaaatgtgatgttgttatctcatgccatcctggcgttctgcctaattttccaaactagagagctagcgcttgcaaattatgcttctgcacctagtaggcagttttttgaatttatctggaaattgcattatgcagagtacttagtttatgttttcatctaa

SEQ ID NO: 617 - DNA, 2148 bp, Artificial Sequence
  Synthetic
atgtcttcaaaagctgaaaagagggcacgtttcgaccatgtgtttgaggtcataagagatgaattggttgaatatttcaaggctcagggcatgcctcaagacgccaccgaatggtacatcaaaaatctaaactacaacgtacccggtggaaagctgaacagaggtcttagcgttgtcgattcggttgagattttgaagggtagagctttgacggaagatgaatactttaaggctgccgtcttaggttggtgcgttgaattgttacaagctttcttcttggtttctgacgatgttatggactcctccatcactagaagaggtcaaccatgttggtatagaaatgaaggtgtaggtttggtcgctatttgggatgcatttattttagaagccgctatttactggctattgaaaaagcacttcagagccgatccaagttacatcaacttggtagaattatttcacgaaacatctttccaaaccgagatgggacaattgcttgacttgataactgctccagaagacaaagtcgatttgtctaagttctccctggaacgtcatagactaatcgttgtgtataagacagctttttactcgttttatctaccagttgcattggctatgtacttatgtggtatttctcaccaagctgcacaggacccttatgctttggccagttccattttaatcccattaggtgagtacttccaagttcaagatgactacttggattttgctggcactccagaacaaattggtaagataggtactgatattgtcgataataaatgttcatggtgcgttaacaccgccttggctcttgctgcccccgcccagagagctgtcctggacgcttcttacggtcgtaaggacgccgctgccgaagctagagttaagaaggtcttcgaagaagtaggtttgcacgctaaatacgctgcctatgaagaagatgcataccgtagaatcgttggcttgattgctaccatcccagaggctggtcttggtgccgacggtgaagtgaagttgcaaagagctgtctttaagagtttcttggataaaatctataaaaggcaaaagggcggaggtggttctggtgggggtggttcgggtggtggtgggtcaggtggtggcggtagcggtggcggtggttccggtggtggtggtagtggaggtgggggttcttcagccgggagcgaccagatagaaggaagtcctcatcacgagtctgataactccattgcgacaaaaatcctgaatttcggtcatacgtgctggaagttacaaaggccctatgtcgtgaaaggtatgatttcgatagcttgtggcttgtttggtcgcgaactatttcataataccaaccttttatcttggtcattgatgctcaaggcattctcatccttaatggtaatcctttcttttaatttctttgctgccataatgaatcaaatttacgatgttgatattgaccgaattaacaaaccagatttgccactcgttagtggagagatgagtatcgaaactgcatggatactatcgatcattgtcgctctgacaggcttaatattgactattaagcttaattgtggtccgctatttatatcattgtattgcgtatctattttcgctggatttgcatacagcgttcctccaattcgttggaaacagtatcctttcaccaacttcttaataactatcagctcacacgtgggtgttaactttacatgttattacgcctccagagcagcctttggcttacccttcgaaatgtctccgccatttacttttattctcgcttttatgaccgtaatgggaatgacaatagctttcgcgaaagacatttcagatatcgaaggtgatgcgaaatatggggtgtctactgttgctacgaagttaggtgcaagaaatatgacgtttgttgtcagtggtgtcttgttgctgacatacgtaagcgctatacttgcagctatcatttggccgcaagcctttaagtcaaatgtgatgttgttatctcatgccatcctggcgttctgcctaattttccaaactagagagctagcgcttgcaaattatgcttctgcacctagtaggcagttttttgaatttatctggaaattgcattatgcagagtacttagtttatgttttcatctaa

SEQ ID NO: 618 - DNA, 2121 bp, Artificial Sequence
  Synthetic
atgtccgacaatcgtacgaagtttttaaacgttttcccatcattggtaaaagagctaagagatattttggctggctacggaatgcccgaagaagccatacagtggtatgaaaagtcgctgaactacaattctgtcggtggtaagttgaacaggggtcttagcgtggttgacacatatgctttattgaaaggttacaagtctgtcgatgaattgtccgacgaagaatacaagaaagttgccatcttgggttggtgtattgaattgttacaagcatatttcctagttgctgatgacatgatggataagtctatcaccagaagaggtcaaccatgctggtacaaagttcctaacgtcggcgaaattgccatctgggatgcttttatgcttgagggtgctatttattgtttgttaaagaaccacttcagacaagagccatactacgtcgacatcctggaattgtttcatgatgtaactttccaaactgaattgggacaacttttggacttaataaccgctccagaagataaggtcgatttgtctaagttttccttagaaaagcactcattcatcgttattttcaaaactgcttattactctttttatctacctgttgcacttgctttgtacgccgctggtattaccgatccaagagacttgaagcaggctagagatgttctgattcctttgggtgagtacttccaaatccaagacgactacttggattgtttcggtaagccagaagacattggtaaaataggtactgatatccaagacaataagtgttcctgggtgataaatattgccctgaaaaaggctagtccagaacaacgtaaggtcttggatgaaaactacggtagaaaggacgctgaaaaggaacagaaatgcagagcagtttttaacgaattagatatcgaatctatttatcatgaatatgaggaaaaggtagcctcagaattgagagctaaaattgctaatatcgatgagagcagaggtttcaaagctgaagttttaacgttatttctaaataagatttaccaccgtaagaagggcggaggtggttctggtgggggtggttcgggtggtggtgggtcaggtggtggcggtagcggtggcggtggttccggtggtggtggtagtggaggtgggggttcttcagccgggagcgaccagatagaaggaagtcctcatcacgagtctgataactccattgcgacaaaaatcctgaatttcggtcatacgtgctggaagttacaaaggccctatgtcgtgaaaggtatgatttcgatagcttgtggcttgtttggtcgcgaactatttcataataccaaccttttatcttggtcattgatgctcaaggcattctcatccttaatggtaatcctttcttttaatttctttgctgccataatgaatcaaatttacgatgttgatattgaccgaattaacaaaccagatttgccactcgttagtggagagatgagtatcgaaactgcatggatactatcgatcattgtcgctctgacaggcttaatattgactattaagcttaattgtggtccgctatttatatcattgtattgcgtatctattttcgctggatttgcatacagcgttcctccaattcgttggaaacagtatcctttcaccaacttcttaataactatcagctcacacgtgggtgttaactttacatgttattacgcctccagagcagcctttggcttacccttcgaaatgtctccgccatttacttttattctcgcttttatgaccgtaatgggaatgacaatagctttcgcgaaagacatttcagatatcgaaggtgatgcgaaatatggggtgtctactgttgctacgaagttaggtgcaagaaatatgacgtttgttgtcagtggtgtcttgttgctgacatacgtaagcgctatacttgcagctatcatttggccgcaagcctttaagtcaaatgtgatgttgttatctcatgccatcctggcgttctgcctaattttccaaactagagagctagcgcttgcaaattatgcttctgcacctagtaggcagttttttgaatttatctggaaattgcattatgcagagtacttagtttatgttttcatctaa

SEQ ID NO: 619 - DNA, 2148 bp, Artificial Sequence
  Synthetic
atgcctgtcacaattcccttgaagacttcaccagaagttatcgccgcttttgagaaaagctaccatgttatagctgaagatcttctacacgacttggaacacaagtataagatgccagcagtaggtgtgcagagaatgcgtcaaatgctggaacataatgttatgggaggtaaaatgaacagaggtttggctgtcgtggacaccttaatgattatcgcacaagctcaaggtaagacgttaactgaagatgatattttcagggctcacgttgccggctgggctatcgagtggttgcaagcctgcttcttggtcgctgacgatatcatggaccaatcccacaccagaagaggtaaaccatgttggtacaggatgccaggtgttggtttggaagctgtctgggacgctctagttttggaaggtcatatttttatgttcataaagaagcacttcagatctcaaccttactatgccgatttagttgacttactacacgaagtagcttacttgactgagttgggacaaatgattgatatgctgaccgcaccagaaggtgatgtcaacttgtcgagattttctttggaccgtcatgcctatattgttgtccataagacttcttactactccttttatctaagtgttgctatggctttcatgctttctggtatcaccaatccagctgctttcgaccaggctaaacaaattttgctgcctttgggtgaatactttcaagtacaggatgattatcttgatgccttcgccgacccctctgtcttaggtaagatcggcaccgacatagaagacaacaagtgtagttggttggttaatacagctctagcaagatgtactccagaacaaagaactttgttagatactaactacggtagaaaggatgccaaatgtatcgaagctgtgaagcaactttacagagatatgcaactagaccaagaatttgaaaggtacgaagaggcatcctacaagagaattatgggtatgatcaacggtatcgataagggattgggtgttccacctgaagtttacgtttcattcatgaacaagatttataaaagaagcaaaggcggaggtggttctggtgggggtggttcgggtggtggtgggtcaggtggtggcggtagcggtggcggtggttccggtggtggtggtagtggaggtgggggttcttcagccgggagcgaccagatagaaggaagtcctcatcacgagtctgataactccattgcgacaaaaatcctgaatttcggtcatacgtgctggaagttacaaaggccctatgtcgtgaaaggtatgatttcgatagcttgtggcttgtttggtcgcgaactatttcataataccaaccttttatcttggtcattgatgctcaaggcattctcatccttaatggtaatcctttcttttaatttctttgctgccataatgaatcaaatttacgatgttgatattgaccgaattaacaaaccagatttgccactcgttagtggagagatgagtatcgaaactgcatggatactatcgatcattgtcgctctgacaggcttaatattgactattaagcttaattgtggtccgctatttatatcattgtattgcgtatctattttcgctggatttgcatacagcgttcctccaattcgttggaaacagtatcctttcaccaacttcttaataactatcagctcacacgtgggtgttaactttacatgttattacgcctccagagcagcctttggcttacccttcgaaatgtctccgccatttacttttattctcgcttttatgaccgtaatgggaatgacaatagctttcgcgaaagacatttcagatatcgaaggtgatgcgaaatatggggtgtctactgttgctacgaagttaggtgcaagaaatatgacgtttgttgtcagtggtgtcttgttgctgacatacgtaagcgctatacttgcagctatcatttggccgcaagcctttaagtcaaatgtgatgttgttatctcatgccatcctggcgttctgcctaattttccaaactagagagctagcgcttgcaaattatgcttctgcacctagtaggcagttttttgaatttatctggaaattgcattatgcagagtacttagtttatgttttcatctaa

SEQ ID NO: 620 - DNA, 2115 bp, Artificial Sequence
  Synthetic
atggccaagtccgcaagcttggagaaatttgaatcaatattcccaactctagttgaagacgtcctggctcactctaagagttacggtttgcctcagcaagctttagattggttcaaaaacaatttgaacgctaatgccattggcggaaagtgcaacaggggtatgtccgtgccagactcagtttctcttatgacaggtaaggaattgaacgaagaggaatattttaaggctgctaccttaggttggttaactgaattgttgcaagcatacttccttgtatcggatgatatcatggactcttcgattaccagacgtggtgttccctgttggtacagacaaccagaagttggtatgatcgctatttgggatgcctttatgttggaatctgctatatatatcttattgaaaaagtacttcagatcccataaatcctatgtcgacttgatggaactgttccacgaagtcacgttccaaactgaattaggccaaacctgtgatttgctaaccgctccagaggataaggttgacttggacaatttctctatggaaaagtacacttttattgtgatctacaagacagcctactatagtttttacctacccgtcgctttggcactgcatcaattgggtattgctactgaaaagaacttgaaacaggctgaagctgttttgatcccacttggtacatatttccaaatacaagacgattacttagacaatttcggtgatcctgaacacattggtaaaatcggaactgatattttggataacaagtgttcttggttggtcaacaaggccctaagcatagctacgccagaacaaagaaaggttttagaggagaactatggtagaaagaataaagacaacgaagctgtcgtaaagaaactgtacaatgaattgggtcttgaaaagttgtaccaagaatacgaggaaaaggaagttggtaacattcgtaagctgatcgatgaaaccgacgaatcagagggtcttaaaaagactgtttttgaatcttttttaggcaaaatttataagagaacgaaaggcggaggtggttctggtgggggtggttcgggtggtggtgggtcaggtggtggcggtagcggtggcggtggttccggtggtggtggtagtggaggtgggggttcttcagccgggagcgaccagatagaaggaagtcctcatcacgagtctgataactccattgcgacaaaaatcctgaatttcggtcatacgtgctggaagttacaaaggccctatgtcgtgaaaggtatgatttcgatagcttgtggcttgtttggtcgcgaactatttcataataccaaccttttatcttggtcattgatgctcaaggcattctcatccttaatggtaatcctttcttttaatttctttgctgccataatgaatcaaatttacgatgttgatattgaccgaattaacaaaccagatttgccactcgttagtggagagatgagtatcgaaactgcatggatactatcgatcattgtcgctctgacaggcttaatattgactattaagcttaattgtggtccgctatttatatcattgtattgcgtatctattttcgctggatttgcatacagcgttcctccaattcgttggaaacagtatcctttcaccaacttcttaataactatcagctcacacgtgggtgttaactttacatgttattacgcctccagagcagcctttggcttacccttcgaaatgtctccgccatttacttttattctcgcttttatgaccgtaatgggaatgacaatagctttcgcgaaagacatttcagatatcgaaggtgatgcgaaatatggggtgtctactgttgctacgaagttaggtgcaagaaatatgacgtttgttgtcagtggtgtcttgttgctgacatacgtaagcgctatacttgcagctatcatttggccgcaagcctttaagtcaaatgtgatgttgttatctcatgccatcctggcgttctgcctaattttccaaactagagagctagcgcttgcaaattatgcttctgcacctagtaggcagttttttgaatttatctggaaattgcattatgcagagtacttagtttatgttttcatctaa

SEQ ID NO: 621 - DNA, 2115 bp, Artificial Sequence
  Synthetic
atggccaaggctgatgctttacaaaaatacgagtcgattttccctacattggtagaagacgtgctagcacactcaaagtcttatggccttccacagcaagctctggactggtttaaaaacaatttgaacgccaacgctataggtggtaagtgcaatagaggaatgagcgttcccgatagtgtctctttaatgaccggtaaggaattgaatgaagaagagtacttcaaagctgccactttgggttggttgactgaactgttgcaagcttactggcttgtctccgatgacatcatggactcctccatcaccaggagaggtgttccatgttggtatcgtcaaccagaagttggtatgattgctattaacgatgcttttatgttagaatctgcaatctatattttgctaaagaagtacttcagatcgcataagtcttacgtcgatttgatggaattatttcacgaagttacgttccaaactgaattgggtcaaacctgtgacctattgactgctcctgagacaaaggttgacttggataacttttccatggaaaaatacaccttcatcgtaatttacaaaactgcctattattcattctacttaccagtcgctttggccctacatcagttgggcatagccaccgaaaagaatctgaagcaagctgaagctatcttgattccacttggtacttacttccaaatacaagatgactatttagacaactttggtgatccagaacacatcggtaagattggtacggatatcttggacaacaagtgtagctggttagttaataaagcattgttgattgctacaccagaacaaagaaaaattttagatgaaaactacggacgtaagaacaaggataatgaggctgtggtcaaaaagctatataacgagctaggtttggaaaagttgtaccaagaatacgaagaatctgaggttggtaagattagaaaattgatcgatgaaactgacgaatctgaaggtcttaaaaagagtgttttcgagtcctttctgggtaagatttacaaaagaaccaagggcggaggtggttctggtgggggtggttcgggtggtggtgggtcaggtggtggcggtagcggtggcggtggttccggtggtggtggtagtggaggtgggggttcttcagccgggagcgaccagatagaaggaagtcctcatcacgagtctgataactccattgcgacaaaaatcctgaatttcggtcatacgtgctggaagttacaaaggccctatgtcgtgaaaggtatgatttcgatagcttgtggcttgtttggtcgcgaactatttcataataccaaccttttatcttggtcattgatgctcaaggcattctcatccttaatggtaatcctttcttttaatttctttgctgccataatgaatcaaatttacgatgttgatattgaccgaattaacaaaccagatttgccactcgttagtggagagatgagtatcgaaactgcatggatactatcgatcattgtcgctctgacaggcttaatattgactattaagcttaattgtggtccgctatttatatcattgtattgcgtatctattttcgctggatttgcatacagcgttcctccaattcgttggaaacagtatcctttcaccaacttcttaataactatcagctcacacgtgggtgttaactttacatgttattacgcctccagagcagcctttggcttacccttcgaaatgtctccgccatttacttttattctcgcttttatgaccgtaatgggaatgacaatagctttcgcgaaagacatttcagatatcgaaggtgatgcgaaatatggggtgtctactgttgctacgaagttaggtgcaagaaatatgacgtttgttgtcagtggtgtcttgttgctgacatacgtaagcgctatacttgcagctatcatttggccgcaagcctttaagtcaaatgtgatgttgttatctcatgccatcctggcgttctgcctaattttccaaactagagagctagcgcttgcaaattatgcttctgcacctagtaggcagttttttgaatttatctggaaattgcattatgcagagtacttagtttatgttttcatctaa

SEQ ID NO: 622 - DNA, 2115 bp, Artificial Sequence
  Synthetic
atggccactacaaccccaagggctgacttcgagaaagtctttccctcattggtagaagatctattaggtgaagcacgtaagtataagctgccagacaatgctcttcaatggttcgaaagatcgttgaacgctaacacgcctggcggtaaattgaacagaggtatgtccgttccagataccggtagccagttattggaaagaccattgtctcctgacgaatttaaggatttagccactttgggatggctgactgaattgttgcaagctttctttcttgtttctgacgatataatggatgcttctattaccagaagaggtgagccatgttggtacagacaagaaggtgtgggtatgatcgccatttgggacgcattcatgctagaatccggaatttacttgactttaaagaagcattttaggagtcacccagcttacttggatctaatcgaattgttccacgaagttacctggcaaactgaattaggtcaactatgcgacttaataactgctccagaggatcatgtcgatttgaatagcttctccatggacaaatatacatttatcgtcatttacaagaccgcatattactctttctacttgccagttgctttggctttacactacttgcgtttagccaccccccagaatttgaagcaagctcatgacatccttattccattgggtgaatattttcaaatccaagatgattacttagacgcattcggagatccttctgttattggtaaaatcggtacggatattaaggacaacaagtgtggctggttgattaaccaagctctacagatatgtactcccgaacaaagaaaggtattggatgaaaactacggtcaaaaggatgacgctaaggaagccaaagtcaaggagttgtacgatgaactgcaacttgaaaagagatatagagcctacgaagagaaaagagttggtgaaatccgtcaacttatagctgctgttgacgaatcaactggtttgaagaagggtgtgtttgaagttttcctggctaaaatttataagagatctaaaggcggaggtggttctggtgggggtggttcgggtggtggtgggtcaggtggtggcggtagcggtggcggtggttccggtggtggtggtagtggaggtgggggttcttcagccgggagcgaccagatagaaggaagtcctcatcacgagtctgataactccattgcgacaaaaatcctgaatttcggtcatacgtgctggaagttacaaaggccctatgtcgtgaaaggtatgatttcgatagcttgtggcttgtttggtcgcgaactatttcataataccaaccttttatcttggtcattgatgctcaaggcattctcatccttaatggtaatcctttcttttaatttctttgctgccataatgaatcaaatttacgatgttgatattgaccgaattaacaaaccagatttgccactcgttagtggagagatgagtatcgaaactgcatggatactatcgatcattgtcgctctgacaggcttaatattgactattaagcttaattgtggtccgctatttatatcattgtattgcgtatctattttcgctggatttgcatacagcgttcctccaattcgttggaaacagtatcctttcaccaacttcttaataactatcagctcacacgtgggtgttaactttacatgttattacgcctccagagcagcctttggcttacccttcgaaatgtctccgccatttacttttattctcgcttttatgaccgtaatgggaatgacaatagctttcgcgaaagacatttcagatatcgaaggtgatgcgaaatatggggtgtctactgttgctacgaagttaggtgcaagaaatatgacgtttgttgtcagtggtgtcttgttgctgacatacgtaagcgctatacttgcagctatcatttggccgcaagcctttaagtcaaatgtgatgttgttatctcatgccatcctggcgttctgcctaattttccaaactagagagctagcgcttgcaaattatgcttctgcacctagtaggcagttttttgaatttatctggaaattgcattatgcagagtacttagtttatgttttcatctaa

SEQ ID NO: 623 - DNA, 2136 bp, Artificial Sequence
  Synthetic
atgtcaaaggaggtagctgccaaaaacaaggtcaagttcttggcatttttcccagacttagtttttgaactggaagttatgcttgaaaattacggtatgcctgctgatgctataaactggttcaaaagatccttgaattataacacgccaggcggtaagctaaaccgtggtatttctgttgtcgacacatacgtgatcttaaaaggttataagtcttgggatgaattgtcggccgaagaatttaagaaggctgctattttgggatggtgtgtcgagttgctacaggcttacttcttggttgctgacgatatgatggaccaaagcatcaccagaagaggtcaaccctgctggtacaaggttgaaaatgtcggtaacattgccatctgggatagttttatgttagaaggtgctatctataaaattttgaggaaatacttcaagaaggagtcctactatgcagatttacttgatttgttgcacgaagtaactttccaaactgaattaggacaactattagacttgatcaccgctcctgaagaccatgttgatttgtctaagttcactccagccaagcactcttttattgtgatctttaaaaccgcttactacagtttctatcttccagttgtcatggctatgtacctgtccggcattacccatgaaaaggacttgcaacaggccgagcacattttaatcccattgggtgaatactttcaaatacaagacgattatttggactgtttcggtaagcccgaagatattggtaaaataggtactgatatccaagacaataagtgttcttgggttattaaccaagccttgagactagctagcccagaacaaagacagattttggatgaaaactacggtagaaaagatgcagataaggaagctaaatgtaaggaagtcttcgaccaattggacattgctggtaaatataaggcttatgaggaaaacattggtaaggaactgcaaaaaagaatagccgacaccgaggaagatcgtggtttcaagaaggaagtttttcaagttttcttcgacaaaatctacaagagaactaagggcggaggtggttctggtgggggtggttcgggtggtggtgggtcaggtggtggcggtagcggtggcggtggttccggtggtggtggtagtggaggtgggggttcttcagccgggagcgaccagatagaaggaagtcctcatcacgagtctgataactccattgcgacaaaaatcctgaatttcggtcatacgtgctggaagttacaaaggccctatgtcgtgaaaggtatgatttcgatagcttgtggcttgtttggtcgcgaactatttcataataccaaccttttatcttggtcattgatgctcaaggcattctcatccttaatggtaatcctttcttttaatttctttgctgccataatgaatcaaatttacgatgttgatattgaccgaattaacaaaccagatttgccactcgttagtggagagatgagtatcgaaactgcatggatactatcgatcattgtcgctctgacaggcttaatattgactattaagcttaattgtggtccgctatttatatcattgtattgcgtatctattttcgctggatttgcatacagcgttcctccaattcgttggaaacagtatcctttcaccaacttcttaataactatcagctcacacgtgggtgttaactttacatgttattacgcctccagagcagcctttggcttacccttcgaaatgtctccgccatttacttttattctcgcttttatgaccgtaatgggaatgacaatagctttcgcgaaagacatttcagatatcgaaggtgatgcgaaatatggggtgtctactgttgctacgaagttaggtgcaagaaatatgacgtttgttgtcagtggtgtcttgttgctgacatacgtaagcgctatacttgcagctatcatttggccgcaagcctttaagtcaaatgtgatgttgttatctcatgccatcctggcgttctgcctaattttccaaactagagagctagcgcttgcaaattatgcttctgcacctagtaggcagttttttgaatttatctggaaattgcattatgcagagtacttagtttatgttttcatctaa

SEQ ID NO: 624 - DNA, 2127 bp, Artificial Sequence
  Synthetic
atgtcaaaagaggaaaagagggaaaagttcttgagtgtgtttccaaagctagttgaagaattaaaatccatattggtaggttatggcatgcgtggtgacgcagttcaatggttcgaaaattcgcttaactacaacacccctggtggaaagttgaatagaggtctgtctgtcgtcgatacttacgccattttgacaggtaagggctcctttaaggatttaagcgacgacgagtatttcaaattggctacgttaggttggtgtatcgaattgctacaggcttacttcctggttgctgatgacatgatggataagtctattaccagaagaggtcaaccatgctggtacagaatcgaaaacgtcggtgaaatagccatctgggatgcttttatgttggaggctgcaatttattgtttgcttaagaaccactttaaaaaggaatcttactacgttgacttaatcgaattgttccatgatgttactttccaaactgaactaggtcaattgttggacctgattaccgctcccgaagacaacgttgatttatctaagttttccttggaaaaacactcttttattgtcagattcaaaactgcctattactccttctaccttccagttgctttggccatgtacgtcgctggaattacagacgctaaggatttgaagcaagctcaagatgtattaatcccattgggtgagtatttccagatccaagacgattacctagattgtttcggtaaaccagaagacataggtaagattggtaccgatatccaagacaataagtgttcctgggtggtgaacactgctttgaagatttgcacacctgaacaacgtactttgcttgatgaaaactatggaaaaaaggacgctgaatcagaaaagaagtgtaagcaacttttttatgatctgaagatcaatgacatgtaccatgagtacgaagagggtattgccaaagaattaaaggaaaagatcgcaaacgttgacgaatcgagaggtttcaaaggcgacgtcctaactgcttttttggaaaaggtttacaagagaaaaaagggcggaggtggttctggtgggggtggttcgggtggtggtgggtcaggtggtggcggtagcggtggcggtggttccggtggtggtggtagtggaggtgggggttcttcagccgggagcgaccagatagaaggaagtcctcatcacgagtctgataactccattgcgacaaaaatcctgaatttcggtcatacgtgctggaagttacaaaggccctatgtcgtgaaaggtatgatttcgatagcttgtggcttgtttggtcgcgaactatttcataataccaaccttttatcttggtcattgatgctcaaggcattctcatccttaatggtaatcctttcttttaatttctttgctgccataatgaatcaaatttacgatgttgatattgaccgaattaacaaaccagatttgccactcgttagtggagagatgagtatcgaaactgcatggatactatcgatcattgtcgctctgacaggcttaatattgactattaagcttaattgtggtccgctatttatatcattgtattgcgtatctattttcgctggatttgcatacagcgttcctccaattcgttggaaacagtatcctttcaccaacttcttaataactatcagctcacacgtgggtgttaactttacatgttattacgcctccagagcagcctttggcttacccttcgaaatgtctccgccatttacttttattctcgcttttatgaccgtaatgggaatgacaatagctttcgcgaaagacatttcagatatcgaaggtgatgcgaaatatggggtgtctactgttgctacgaagttaggtgcaagaaatatgacgtttgttgtcagtggtgtcttgttgctgacatacgtaagcgctatacttgcagctatcatttggccgcaagcctttaagtcaaatgtgatgttgttatctcatgccatcctggcgttctgcctaattttccaaactagagagctagcgcttgcaaattatgcttctgcacctagtaggcagttttttgaatttatctggaaattgcattatgcagagtacttagtttatgttttcatctaa

SEQ ID NO: 625 - DNA, 2124 bp, Artificial Sequence
  Synthetic
atgactaccacatccaagcaacaggagatcgatgaatttataaaaatttgctacgaactaaaggaagaagtgttaactaccatgaagacgaaatatactatgccacaagaagctattgactgggttaatgaaatgatcgattacaactgtattggaggtaagctgaacagaggtatatcagtaatccactgtgcagaagctcttacccaaggtaagggcttgactcctgaggcccgtaaaaaagctgccattttgggttggtgtattgaatggttgcaagctttcttcttggtcgccgacgatgttatggacgactctatcacaaggagaggtcaaccctgttggtatagaatcccaaaggtcaagcaaatagctatttgggatgcttttttattggaatcgttcgtttaccaaatcttgaagacgcatttcagaggtgaaagttactacttagatttggtcgaaacttttcaggaggtcatcttccaaaccgaactaggtcaattgttggaccttacttcccaaccattagacggcccaacgaatttagatagattcacaattgagcgtcaccaaaagattgtggtttttaaaaccgcttattatactttttacttgagcgccgcttctgcaatgttcctgtcgggtgtttctgatcctgcttgttacactctggcccaagaaatatgcgttaagattggtgaatactttcaggttcaagacgattatttggactgttacgctgatccagaagtcttgggtaaaatcggtactgatattcaagataacaagtgttcttggttagttgtacaagccctggctagagctaccccagaacagagagccgttattaaggaacactacggtaagaataacgaagcttccatcgctgtaatcaaggcattgtacgtcagcttagatttggagggagtttatagaaagtatgaaaacgaatcttatgacgagctatgcaagcttattggtgccgtcaacaacatgcccgctaccgttttccatatgttattgagtaaaatatacaaacgtacgatgggcggaggtggttctggtgggggtggttcgggtggtggtgggtcaggtggtggcggtagcggtggcggtggttccggtggtggtggtagtggaggtgggggttcttcagccgggagcgaccagatagaaggaagtcctcatcacgagtctgataactccattgcgacaaaaatcctgaatttcggtcatacgtgctggaagttacaaaggccctatgtcgtgaaaggtatgatttcgatagcttgtggcttgtttggtcgcgaactatttcataataccaaccttttatcttggtcattgatgctcaaggcattctcatccttaatggtaatcctttcttttaatttctttgctgccataatgaatcaaatttacgatgttgatattgaccgaattaacaaaccagatttgccactcgttagtggagagatgagtatcgaaactgcatggatactatcgatcattgtcgctctgacaggcttaatattgactattaagcttaattgtggtccgctatttatatcattgtattgcgtatctattttcgctggatttgcatacagcgttcctccaattcgttggaaacagtatcctttcaccaacttcttaataactatcagctcacacgtgggtgttaactttacatgttattacgcctccagagcagcctttggcttacccttcgaaatgtctccgccatttacttttattctcgcttttatgaccgtaatgggaatgacaatagctttcgcgaaagacatttcagatatcgaaggtgatgcgaaatatggggtgtctactgttgctacgaagttaggtgcaagaaatatgacgtttgttgtcagtggtgtcttgttgctgacatacgtaagcgctatacttgcagctatcatttggccgcaagcctttaagtcaaatgtgatgttgttatctcatgccatcctggcgttctgcctaattttccaaactagagagctagcgcttgcaaattatgcttctgcacctagtaggcagttttttgaatttatctggaaattgcattatgcagagtacttagtttatgttttcatctaa

SEQ ID NO: 626 - DNA, 2115 bp, Artificial Sequence
  Synthetic
atggctcagaaaacgactctaaaggagtttgaagccgtttacccaaagcttgaagaagctttattggatcatgcaaaatcctataagttgcccgaaaaggaactggagtggttgaagaagaacttggaagtcaatccattaggcggtaaatgcaaccgtggaatgtcagtgcctgactcggctagtgttatattgggtaggcctttaaccgaagacgaatacttcaagacagccactttgggttggatgactgaattattgcaagctttctttctagtctctgatgacatcatggattcttccattaccagaagaggtcaaccatgttggtatagacaagaaggtgttggtatgattgctatctgggacgccttcatcttggaaagcggtatttacattatcttaaaaaagttctttcgtgatcacccaagatacatagagttggtagaattattccacgagacttctttccaaaccgaactgggtcaattgtgtgacctattgacagctccagaagattctgttaatttggacaacttttccctggaaaagtacagtttcatcgtcatttataaaaccgctttttactcattctacttgccagtcgccctagcactgtactatttggatattgctactcctaagaacttacaaacggctaaagatattttgattccattgggtgaatatttccagatccaagacgactatcttgataattttggtttgccagaacatatcggcaagattggcactgacatcaaggataacaagtgttcttggttggttaaccaagcacttaaaatcgtcagtccagagcaaagaaaaattcttgaagacaactacggacagaaggatgatgccaaggaaaaagttataaagcaattgtacgatgacttaaagttaaaggaactttacgaggaatttgaagaaaagagagctggtgaattgaaagatatgattaataagatcgacgaatccgagggtttgaaaaagcaagtattcgaagttttcttaggtaagatctacaagagatctaagggcggaggtggttctggtgggggtggttcgggtggtggtgggtcaggtggtggcggtagcggtggcggtggttccggtggtggtggtagtggaggtgggggttcttcagccgggagcgaccagatagaaggaagtcctcatcacgagtctgataactccattgcgacaaaaatcctgaatttcggtcatacgtgctggaagttacaaaggccctatgtcgtgaaaggtatgatttcgatagcttgtggcttgtttggtcgcgaactatttcataataccaaccttttatcttggtcattgatgctcaaggcattctcatccttaatggtaatcctttcttttaatttctttgctgccataatgaatcaaatttacgatgttgatattgaccgaattaacaaaccagatttgccactcgttagtggagagatgagtatcgaaactgcatggatactatcgatcattgtcgctctgacaggcttaatattgactattaagcttaattgtggtccgctatttatatcattgtattgcgtatctattttcgctggatttgcatacagcgttcctccaattcgttggaaacagtatcctttcaccaacttcttaataactatcagctcacacgtgggtgttaactttacatgttattacgcctccagagcagcctttggcttacccttcgaaatgtctccgccatttacttttattctcgcttttatgaccgtaatgggaatgacaatagctttcgcgaaagacatttcagatatcgaaggtgatgcgaaatatggggtgtctactgttgctacgaagttaggtgcaagaaatatgacgtttgttgtcagtggtgtcttgttgctgacatacgtaagcgctatacttgcagctatcatttggccgcaagcctttaagtcaaatgtgatgttgttatctcatgccatcctggcgttctgcctaattttccaaactagagagctagcgcttgcaaattatgcttctgcacctagtaggcagttttttgaatttatctggaaattgcattatgcagagtacttagtttatgttttcatctaa

SEQ ID NO: 627 - DNA, 2124 bp, Artificial Sequence
  Synthetic
atggacaagcaagccgcaaaagataagtttatcggtgaatttgatgctctagtcgacgagttaaaacagatacttcatcactataagatgccacaagaagctgttgattggttcaccaaaaacttgtactacaatgctcccggcggtaagttgaaccgtggactgtcggtaattgacacatactgcatcttaaagaatgtgaagattgaagaattgtcagatgccgagtataagaaagttgctatcttgggttgggctattgaattgctgcaagcttacttcttggttgcagatgacatgatggatcaaagcaagactaggagaggtcaaccttgttggtatttaaagccaggtgtcggtaacatagccatttgggactctttcatgttagaaggtgctatttacgttttgttgaaaaagcacttcagacaagacccatactatgtggatttgttggacctatttcatgaagtcacgttccagactgaattgggccaacttttagatttggttaccgctgacgaagagcacgtcgatttggataaattttccctgcaaaagcattctttcatcgttatttttaaaactgcttactactccttctacctaccagtcgccttggcaatgtttatgtccggtgtaagttctcaaaaggacttggaacaagttaagaacgtcttgatccctttaggagaatacttccagattcaagatgactacttggattgttttggtaccccagaacaaatcggtaagatcggtactgacatcaaagataataagtgttcttgggttgtcaaccaagctctattgaaggttaatgctgagcagagaaaactgttagacgaaaactatggtaagaaggatgatgaaagtgaagccagagttaagaagcttttccacgacttagacattccaaaaatctacaatgaatacgaagaggacgttgtctctcgtttgagagctcaaattgaaaacatcgatgaatcaagaggtttgaagaaggaagtcctgaccagtttccttaacaaagtttataagagatccaagggcggaggtggttctggtgggggtggttcgggtggtggtgggtcaggtggtggcggtagcggtggcggtggttccggtggtggtggtagtggaggtgggggttcttcagccgggagcgaccagatagaaggaagtcctcatcacgagtctgataactccattgcgacaaaaatcctgaatttcggtcatacgtgctggaagttacaaaggccctatgtcgtgaaaggtatgatttcgatagcttgtggcttgtttggtcgcgaactatttcataataccaaccttttatcttggtcattgatgctcaaggcattctcatccttaatggtaatcctttcttttaatttctttgctgccataatgaatcaaatttacgatgttgatattgaccgaattaacaaaccagatttgccactcgttagtggagagatgagtatcgaaactgcatggatactatcgatcattgtcgctctgacaggcttaatattgactattaagcttaattgtggtccgctatttatatcattgtattgcgtatctattttcgctggatttgcatacagcgttcctccaattcgttggaaacagtatcctttcaccaacttcttaataactatcagctcacacgtgggtgttaactttacatgttattacgcctccagagcagcctttggcttacccttcgaaatgtctccgccatttacttttattctcgcttttatgaccgtaatgggaatgacaatagctttcgcgaaagacatttcagatatcgaaggtgatgcgaaatatggggtgtctactgttgctacgaagttaggtgcaagaaatatgacgtttgttgtcagtggtgtcttgttgctgacatacgtaagcgctatacttgcagctatcatttggccgcaagcctttaagtcaaatgtgatgttgttatctcatgccatcctggcgttctgcctaattttccaaactagagagctagcgcttgcaaattatgcttctgcacctagtaggcagttttttgaatttatctggaaattgcattatgcagagtacttagtttatgttttcatctaa

SEQ ID NO: 628 - DNA, 2115 bp, Artificial Sequence
  Synthetic
atgggaaagacaaccttaaaagagttcgaagcagtttttcccttgcttgtggacgaactaatgggcgtcctggaacaatacaagatcccagccgaagctgctgcttggtataggcgtaatttggaacagaacacgttgggtggtaaatgcaacagaggtatgtccgttgtcgatacttactctatattgactggtcaagacaagttatcagataccgagtatttaagaactgctattttgggttggtgtaccgaactattgcaagccttctttttagttgctgatgacatcatggatagctcgaagactcgtagaggttccccatgttggtacttgttcgacggtgtaggaaatattgctatttgggattcttttatgcttgaatctgctgttttcatattgattaagaagcatttcagaaaagaatcttactatatcgatttggtcgaattgttccaagagacaatctttcaaaccgaactaggtcagttactagacttaattactgcccctgaagatagagttgacttgagtaaattttcccttgccaagcacagtttcatcgtcattttcaagactgcttactatagcttttacttgccagtagctttggcaatgtacatggctggtattgctactgaatctaacttgaagcaagcaagagatgttttaatcccattgggtgaatacttccaaatccaagacgattatttggactgttacggtgatcctgaacacatcggcaagattggtaccgacataaaggataataaatgtggttggctgatcaacaaggccttagctattgccacaccagaacaaagagatatcttggacaaaaactacggtagaaaggacgatgaggctgaagctagaattaagcaagtttacatcgagttggaactggaaaagtgctaccaagaatatgaggaacaagcagtcggcaaaattcgtggtcttattgatcaagtcgacgaatcaaatggtttgaaaaaagaagttcttacctccttcttgaacaagatttataagcgtagcaaaggcggaggtggttctggtgggggtggttcgggtggtggtgggtcaggtggtggcggtagcggtggcggtggttccggtggtggtggtagtggaggtgggggttcttcagccgggagcgaccagatagaaggaagtcctcatcacgagtctgataactccattgcgacaaaaatcctgaatttcggtcatacgtgctggaagttacaaaggccctatgtcgtgaaaggtatgatttcgatagcttgtggcttgtttggtcgcgaactatttcataataccaaccttttatcttggtcattgatgctcaaggcattctcatccttaatggtaatcctttcttttaatttctttgctgccataatgaatcaaatttacgatgttgatattgaccgaattaacaaaccagatttgccactcgttagtggagagatgagtatcgaaactgcatggatactatcgatcattgtcgctctgacaggcttaatattgactattaagcttaattgtggtccgctatttatatcattgtattgcgtatctattttcgctggatttgcatacagcgttcctccaattcgttggaaacagtatcctttcaccaacttcttaataactatcagctcacacgtgggtgttaactttacatgttattacgcctccagagcagcctttggcttacccttcgaaatgtctccgccatttacttttattctcgcttttatgaccgtaatgggaatgacaatagctttcgcgaaagacatttcagatatcgaaggtgatgcgaaatatggggtgtctactgttgctacgaagttaggtgcaagaaatatgacgtttgttgtcagtggtgtcttgttgctgacatacgtaagcgctatacttgcagctatcatttggccgcaagcctttaagtcaaatgtgatgttgttatctcatgccatcctggcgttctgcctaattttccaaactagagagctagcgcttgcaaattatgcttctgcacctagtaggcagttttttgaatttatctggaaattgcattatgcagagtacttagtttatgttttcatctaa

SEQ ID NO: 629 - DNA, 2127 bp, Artificial Sequence
  Synthetic
atgtccaaagaaggtaaccgtgagaagtttcttgaagaatttccagaattagttcacgaactgaagaccattctacagaattatggaatgcctcaagacgctatccaatggtacgagtcatctttgttcttcaacacaccaggtggtaagttgaacaggggtttgtcggtcgtagatacttacgttatattgaaaggctataagtctttctccgatatggccaaggaagaatacaaaaaggtcgctattttaggttggtgcatcgaattattgcaagcatacttcctggttgctgacgatatgatggacaagtctattactagaagaggtcaaccctgttggtatagagtgaagggagtcggtgaaattgccatctgggatgcttttatgttggaagctgctatatacatcttgctaaaaaatcattttcgtagcgagagttactacgttgacctaattgaattgttccacgatgttaccttccaaactgaattgggtcaattattggacctgattaccgccccagaagataaagttgaccttaataagttttctatgaacaagcagtccttcatagttagattcaagacggcatattactcgttctatttgccagtcgctttagctatgtacatggcaggtatcaactctgacactgatttgcaacaagctcaagatgtgttgatccctttgggtgagtactttcaaattcaagacgacttcttggattgttttggtaccccagaacagatcggtaagattggcacggatatacaagataacaagtgttcctgggtcattaataaggccctggaattggtcaccccagaacaaagaaaagttcttgatgaaaactatggtcaaaagaaccaggaatgcgaagacaaatgtagagaagtattcaattcattaaatctaccaaagtactatgaacaatacgaagaaaacatcgctaaggagttaagagagaagatctctcaaattgatgagtccagaggtttcaaaggagaagttctgactgtctttcttaacaagatttacaaaaggacaaagggcggaggtggttctggtgggggtggttcgggtggtggtgggtcaggtggtggcggtagcggtggcggtggttccggtggtggtggtagtggaggtgggggttcttcagccgggagcgaccagatagaaggaagtcctcatcacgagtctgataactccattgcgacaaaaatcctgaatttcggtcatacgtgctggaagttacaaaggccctatgtcgtgaaaggtatgatttcgatagcttgtggcttgtttggtcgcgaactatttcataataccaaccttttatcttggtcattgatgctcaaggcattctcatccttaatggtaatcctttcttttaatttctttgctgccataatgaatcaaatttacgatgttgatattgaccgaattaacaaaccagatttgccactcgttagtggagagatgagtatcgaaactgcatggatactatcgatcattgtcgctctgacaggcttaatattgactattaagcttaattgtggtccgctatttatatcattgtattgcgtatctattttcgctggatttgcatacagcgttcctccaattcgttggaaacagtatcctttcaccaacttcttaataactatcagctcacacgtgggtgttaactttacatgttattacgcctccagagcagcctttggcttacccttcgaaatgtctccgccatttacttttattctcgcttttatgaccgtaatgggaatgacaatagctttcgcgaaagacatttcagatatcgaaggtgatgcgaaatatggggtgtctactgttgctacgaagttaggtgcaagaaatatgacgtttgttgtcagtggtgtcttgttgctgacatacgtaagcgctatacttgcagctatcatttggccgcaagcctttaagtcaaatgtgatgttgttatctcatgccatcctggcgttctgcctaattttccaaactagagagctagcgcttgcaaattatgcttctgcacctagtaggcagttttttgaatttatctggaaattgcattatgcagagtacttagtttatgttttcatctaa

SEQ ID NO: 630 - DNA, 2127 bp, Artificial Sequence
  Synthetic
atgtcgaaggctgagtctaaaagcaagttcctggcagtttttcctaagatagtcaacgaattacagagtattctaaaatcatataatatgtcccaagaagccatcgactggttcaccaacaaccttaattacaacactccaggtggcaagttgaataggggattgagcgtggttgatacatacgtcattttaaaaaactatacttctatcaatgacttgtccaccgaagaatacgaaaaggtagctattttgggttggtgtatcgagttgctacaagcttactttttggttgccgatgatatgatggactcttccatcacgagaagaggtcaaccatgctggtatcgtgtcgaaaacgttaaccaaattgctatttgggattctttcatgttagaagcttctatctacgttttgttgaagaatcatttcagaaatgacccctactatgttgacttgatcgaactattccacgatattacttttaaaaccgaattaggtcaattgcttgatttgatcaccgcaccagaagataacgtcaacctatccaatttctcactggacaagcactcttttatagtaatttacaagacagcttactatagtttctacttgccagtagccttagctatgtatatggcaaacgtcagtaacgaaattgacttgaagcaagcccatgatatacttattccactaggtgagtactttcagatacaagatgacttccttgattgttttggtaagcctgaagatatcggtaagattggaactgacattcaagacaacaaatgttcctggatcatcaataccgctttaactttggccgacaaggaacaaaagcaattgttggacaacaactatggtcagaaagatgctgctaaagagaaaatttgcaaagatattttccaaaatttgaagattgaccaaatctaccacgattatgaagaaaagatcgtcaacgaacttaagcaaaagatttctaaggttgatcagtcgagaggttttaagtctgaagttttaagcgttttcctgaacaagatatacaagagaaaaaagggcggaggtggttctggtgggggtggttcgggtggtggtgggtcaggtggtggcggtagcggtggcggtggttccggtggtggtggtagtggaggtgggggttcttcagccgggagcgaccagatagaaggaagtcctcatcacgagtctgataactccattgcgacaaaaatcctgaatttcggtcatacgtgctggaagttacaaaggccctatgtcgtgaaaggtatgatttcgatagcttgtggcttgtttggtcgcgaactatttcataataccaaccttttatcttggtcattgatgctcaaggcattctcatccttaatggtaatcctttcttttaatttctttgctgccataatgaatcaaatttacgatgttgatattgaccgaattaacaaaccagatttgccactcgttagtggagagatgagtatcgaaactgcatggatactatcgatcattgtcgctctgacaggcttaatattgactattaagcttaattgtggtccgctatttatatcattgtattgcgtatctattttcgctggatttgcatacagcgttcctccaattcgttggaaacagtatcctttcaccaacttcttaataactatcagctcacacgtgggtgttaactttacatgttattacgcctccagagcagcctttggcttacccttcgaaatgtctccgccatttacttttattctcgcttttatgaccgtaatgggaatgacaatagctttcgcgaaagacatttcagatatcgaaggtgatgcgaaatatggggtgtctactgttgctacgaagttaggtgcaagaaatatgacgtttgttgtcagtggtgtcttgttgctgacatacgtaagcgctatacttgcagctatcatttggccgcaagcctttaagtcaaatgtgatgttgttatctcatgccatcctggcgttctgcctaattttccaaactagagagctagcgcttgcaaattatgcttctgcacctagtaggcagttttttgaatttatctggaaattgcattatgcagagtacttagtttatgttttcatctaa

SEQ ID NO: 631 - DNA, 2127 bp, Artificial Sequence
  Synthetic
atgacgaaagaggataatcgtaagaagtttttggaccaattcccttccctagtagcccagttaacagaagctttgaaaacttacggtattccccaagatgcaatcgactggtatgaaaagtctctgatgtacaacaccccaggaggtaagttgaacaggggtttaagcgtggttgacacctatgtcatattgaagggccttaacagtccattcgatatgccagatgaagaatactcaaaagttgctttgctaggttggtgtgtcgagttgttacaagcttactttcttgttgccgacgatatgatggacaagtctattactagaagaggtcaaccatgctggtatagaatcgatgaagttggtgacatggctatttgggatgctttcatgttggaagcagctatctactgtttgttaaagagaaatttcagaaacgaatcttactatgtcgatttgttggaattgcttcacgacgttacttttcaaacagaagttggtcaattattagatttgatgactgcccctgagatgctgattgatctatccaaattcagtttggaaagacattcgtacattgtcatctttaagaccgcttactattctttctacttgccagtggctctggcaatgcacatatcaggcgttaacgacgaacgtgatttgcagcaagctaaggacgtccttctaccattgggtgaatacttccaaattcaggacgactatttagactgttttggtaagcctgaggatatcggtaaaataggtaccgacatccaagataataaatgctcctgggtaattaacgccgctttgaagttgtgttctccagaacaaagaaaaatcttggatgataactacggaagaaagagtgacatttgtgaacaaaagtgtaagcaagttttcgccgatctaaatctggaaaaagtttatgaaaattacgaagaacaagtcgcagctaagttaagagacagaattgagatgactgatgaatctaggggttttaagagagaagtgctatatagctttttggataagatatacaaaagaaagaaaggcggaggtggttctggtgggggtggttcgggtggtggtgggtcaggtggtggcggtagcggtggcggtggttccggtggtggtggtagtggaggtgggggttcttcagccgggagcgaccagatagaaggaagtcctcatcacgagtctgataactccattgcgacaaaaatcctgaatttcggtcatacgtgctggaagttacaaaggccctatgtcgtgaaaggtatgatttcgatagcttgtggcttgtttggtcgcgaactatttcataataccaaccttttatcttggtcattgatgctcaaggcattctcatccttaatggtaatcctttcttttaatttctttgctgccataatgaatcaaatttacgatgttgatattgaccgaattaacaaaccagatttgccactcgttagtggagagatgagtatcgaaactgcatggatactatcgatcattgtcgctctgacaggcttaatattgactattaagcttaattgtggtccgctatttatatcattgtattgcgtatctattttcgctggatttgcatacagcgttcctccaattcgttggaaacagtatcctttcaccaacttcttaataactatcagctcacacgtgggtgttaactttacatgttattacgcctccagagcagcctttggcttacccttcgaaatgtctccgccatttacttttattctcgcttttatgaccgtaatgggaatgacaatagctttcgcgaaagacatttcagatatcgaaggtgatgcgaaatatggggtgtctactgttgctacgaagttaggtgcaagaaatatgacgtttgttgtcagtggtgtcttgttgctgacatacgtaagcgctatacttgcagctatcatttggccgcaagcctttaagtcaaatgtgatgttgttatctcatgccatcctggcgttctgcctaattttccaaactagagagctagcgcttgcaaattatgcttctgcacctagtaggcagttttttgaatttatctggaaattgcattatgcagagtacttagtttatgttttcatctaa

SEQ ID NO: 632 - DNA, 2124 bp, Artificial Sequence
  Synthetic
atggataagcaagcagctaaagaccgttttatcaaggagttcgatcagttagtcaaggaattgcaagaaatactaactaactacaaaatgcctcaagaagccattgactggttcacaaagtcactggactataataccccaggcggtaagcttaacagaggattgtccgtgatcgatacctacgctattttgaagggtactacgtctgataaattaggtgacgaagaatataagaaagctgctttgttgggttggtgcattgaattgctacaagcctactttttagttgctgacgatatgatggatgctagtaagacaaggagaggtcaaccctgttggtacttagttgaaggtgtcggaaacatcgcaatttgggactctttcatgttggagggtgctatatatatcttgctgaagaaacatttcagacaagacaagtactatgttgatcttttggatttgtttcacgaagtaactttccaaaccgaattgggtcagctattggatttagtcactgccgatgaagaacacgttgaccttgacaagtttagcttggagaagcattccttcattgttaccttcaaaactgcttactactctttttacttgccagtagctttatcgatgttcatggtcggcgtttcatctgaagaggacctgaaacaagcaagagatattcttatcccactgggtgaatattttcaaatacaagacgatttcctagattgtttcggtactccagaacaaatcggtaagatcggtaccgatattaaggacaataagtgttcctgggtggtcaataaggccttgaacaaagttaaccaagctcaacgtaaattattggatgaaaactacggtaagaaggacgatgaatctgaacagagagttaaagacttgttcaaggaattggaaattgaaaaggactattaccagtatgaagagtccatcgtatcggagctgaagcaaaaaattgaccaagttgatgaaagtagaggtttcaaaaaggaagtcttgaccagctttttgggtaaggtttacaagagaagcaaaggcggaggtggttctggtgggggtggttcgggtggtggtgggtcaggtggtggcggtagcggtggcggtggttccggtggtggtggtagtggaggtgggggttcttcagccgggagcgaccagatagaaggaagtcctcatcacgagtctgataactccattgcgacaaaaatcctgaatttcggtcatacgtgctggaagttacaaaggccctatgtcgtgaaaggtatgatttcgatagcttgtggcttgtttggtcgcgaactatttcataataccaaccttttatcttggtcattgatgctcaaggcattctcatccttaatggtaatcctttcttttaatttctttgctgccataatgaatcaaatttacgatgttgatattgaccgaattaacaaaccagatttgccactcgttagtggagagatgagtatcgaaactgcatggatactatcgatcattgtcgctctgacaggcttaatattgactattaagcttaattgtggtccgctatttatatcattgtattgcgtatctattttcgctggatttgcatacagcgttcctccaattcgttggaaacagtatcctttcaccaacttcttaataactatcagctcacacgtgggtgttaactttacatgttattacgcctccagagcagcctttggcttacccttcgaaatgtctccgccatttacttttattctcgcttttatgaccgtaatgggaatgacaatagctttcgcgaaagacatttcagatatcgaaggtgatgcgaaatatggggtgtctactgttgctacgaagttaggtgcaagaaatatgacgtttgttgtcagtggtgtcttgttgctgacatacgtaagcgctatacttgcagctatcatttggccgcaagcctttaagtcaaatgtgatgttgttatctcatgccatcctggcgttctgcctaattttccaaactagagagctagcgcttgcaaattatgcttctgcacctagtaggcagttttttgaatttatctggaaattgcattatgcagagtacttagtttatgttttcatctaa

SEQ ID NO: 633 - DNA, 2136 bp, Artificial Sequence
  Synthetic
atggtcgcagccactaattctttgtcaaaagaagacaagagggctaagtttgaggctgttttccccattctggtggatgaaatagtagattacttaacgtcggttaacgtcccacaagacgctaaggattggttcaaaaagagcctttatcacaacaccctaggcggtaagtacaatagaggattgtccgttatcgacacatatgaaattttgtctggtaaagccttggatgacaactcctactttagagctgctttattgggttggtgcatcgaattattgcaggccttctttctagttgctgatgacatgatggatgaaagtaagactcgtagaggtcaaccttgttggtacttgatgccaaatgttggttctattgctatctgggattctttcatgttagaatccgccatctatttcttgcttaaaaagcattttagacacgaaacttactacgtcgacttgttggacttgttccatgaggtcaccttccaaaccactctaggtcaagaattagacttgttgaccgcaccagagaaccacgtcgatttaagcaagttctctcaagataagcatgcttttattgttatttttaagactgcttactacagcttctatctgccagttgccttggctatgtgtatggcaaacgtagccacaccagacaatttacaaagagcttcagatgtcctaatacctttgggtaaatattttcagattcaagatgactacttggattgttacggtgacccatcggttaccggcaaggtgggtactgatatccttgacaacaagtgttcctggttgattaatgttgctctggctaaggcttcacctgaacaacgtaaagttttggatgaaaactatggtagaaaagacgcagactgcgaaaagagggttaaggccgtcttcgaagagttaaacttaaagaaagcttatgaagaatacgaagaatctgaagtttctactattaaacaaagaatctctgtcctagatgagtccgctggattgaagaaggaagcattcacaacttttttgaataagatatacaagagaagtaagggcggaggtggttctggtgggggtggttcgggtggtggtgggtcaggtggtggcggtagcggtggcggtggttccggtggtggtggtagtggaggtgggggttcttcagccgggagcgaccagatagaaggaagtcctcatcacgagtctgataactccattgcgacaaaaatcctgaatttcggtcatacgtgctggaagttacaaaggccctatgtcgtgaaaggtatgatttcgatagcttgtggcttgtttggtcgcgaactatttcataataccaaccttttatcttggtcattgatgctcaaggcattctcatccttaatggtaatcctttcttttaatttctttgctgccataatgaatcaaatttacgatgttgatattgaccgaattaacaaaccagatttgccactcgttagtggagagatgagtatcgaaactgcatggatactatcgatcattgtcgctctgacaggcttaatattgactattaagcttaattgtggtccgctatttatatcattgtattgcgtatctattttcgctggatttgcatacagcgttcctccaattcgttggaaacagtatcctttcaccaacttcttaataactatcagctcacacgtgggtgttaactttacatgttattacgcctccagagcagcctttggcttacccttcgaaatgtctccgccatttacttttattctcgcttttatgaccgtaatgggaatgacaatagctttcgcgaaagacatttcagatatcgaaggtgatgcgaaatatggggtgtctactgttgctacgaagttaggtgcaagaaatatgacgtttgttgtcagtggtgtcttgttgctgacatacgtaagcgctatacttgcagctatcatttggccgcaagcctttaagtcaaatgtgatgttgttatctcatgccatcctggcgttctgcctaattttccaaactagagagctagcgcttgcaaattatgcttctgcacctagtaggcagttttttgaatttatctggaaattgcattatgcagagtacttagtttatgttttcatctaa

SEQ ID NO: 634 - DNA, 2124 bp, Artificial Sequence
  Synthetic
atggataaagcagctatacgtaagaagttcaccgacgagtttgacggtttagtcgatgaattgaaggaaatgcttgtattgtacaacatgccagccgaagctattgaatggttccaaaagaatctggactataacacgcctggcggtaaactaaataggggattgtccgttatcgatacatactgcattttaaagggtaaaaagctggaagacttgtcggctgccgaatataaaaaggttgctatcttgggttggtgtattgagttgctacaggcttactttttggtggctgatgacatgatggatcaatcaaagactagaagaggtcaaccatgttggtacttagttgaaggtgtcggtaacatagcaatctgggatagtttcatgcttgaaggtgctatctatatgttgttaaagaagcacttcagacaagactcttactacgtcgatttgcttgacttgtttcatgaggttacctttcaaactgaattgggtcaactattagatttggtgaccgccgacgaggaacacgtagatttggacaaattctccttagctaagcattctttcattgttattttcaaaactgcctactatagcttctacttaccagttgctttagctatgtttatgtgtggcattaactctgatgccgacttgaaacaggtcagagatgttttgatccccttgggtgaatactttcaaatccaagatgatttcttggactgtttcggtactccagaacaaatcggaaagattggaacagacatcaaggacaataagtgttcttgggtcgtgaaccaggcattgttaaaggctacccctgaacaaagaaaggttttggatgaaaattatggtaaaaaggatgacgaatccgaacaaagagttaaagacttgtttaacgagatgaagattgccgacatttataatgaatacgaagaagctataggtgctaagctaaaggaacaaatagataaagtcgatgaatctaggggtttaaaaaaggaagttctgaccgccttcttggctaaagtctacaagcgttcgaagggcggaggtggttctggtgggggtggttcgggtggtggtgggtcaggtggtggcggtagcggtggcggtggttccggtggtggtggtagtggaggtgggggttcttcagccgggagcgaccagatagaaggaagtcctcatcacgagtctgataactccattgcgacaaaaatcctgaatttcggtcatacgtgctggaagttacaaaggccctatgtcgtgaaaggtatgatttcgatagcttgtggcttgtttggtcgcgaactatttcataataccaaccttttatcttggtcattgatgctcaaggcattctcatccttaatggtaatcctttcttttaatttctttgctgccataatgaatcaaatttacgatgttgatattgaccgaattaacaaaccagatttgccactcgttagtggagagatgagtatcgaaactgcatggatactatcgatcattgtcgctctgacaggcttaatattgactattaagcttaattgtggtccgctatttatatcattgtattgcgtatctattttcgctggatttgcatacagcgttcctccaattcgttggaaacagtatcctttcaccaacttcttaataactatcagctcacacgtgggtgttaactttacatgttattacgcctccagagcagcctttggcttacccttcgaaatgtctccgccatttacttttattctcgcttttatgaccgtaatgggaatgacaatagctttcgcgaaagacatttcagatatcgaaggtgatgcgaaatatggggtgtctactgttgctacgaagttaggtgcaagaaatatgacgtttgttgtcagtggtgtcttgttgctgacatacgtaagcgctatacttgcagctatcatttggccgcaagcctttaagtcaaatgtgatgttgttatctcatgccatcctggcgttctgcctaattttccaaactagagagctagcgcttgcaaattatgcttctgcacctagtaggcagttttttgaatttatctggaaattgcattatgcagagtacttagtttatgttttcatctaa

SEQ ID NO: 635 - DNA, 2124 bp, Artificial Sequence
  Synthetic
atggacaaggccgcagctaaagaaaggttcatcaatgagtttgatcagttggttgaagaattaaaggctatattgattggatacaagatgcctcaagatgctatcgactggttcgtcggtaacctaaactataacaccccaggtggtaaactgaatcgtggcctttctgtaattgatacttactgtattttaaacaacacaacggccaatgacttgtcatccgaagagtattctaaggttgctttgttgggttggtgcatcgaattgttacaagcttactttctagtcgcagacgatatgatggaccactcgaagaccagaagaggtcaaccctgttggtacttgaacgaaggtgttggtaatatagctatttgggatagcttcatgttggaaggagccctatatatccttttgaaaaagcatttcagaaacgaaaagtactacgttgatttattggacctatttcacgaggtgactttccaaactgaacttggtcaattgattgatttaattaccgctgacgaagaaatcgtcgacttggataaattttctctttccaagcatagtttcatagttatttataaaacagcttattactctttctacttaccagtggccttggctatgtttatgtctggcatcaattccgaacaagatttgaagcaagtaagagatatcttgattccactgggtgagtatttccaaatccaggatgactttttggattgtttcggtactccagaacaaattggtaagattggtaccgacataaaggataacaagtgctcttgggtcgttaaccaagcattacttcacgctaatgaagaacaaagaaaattgttggacgaaaattacggaaagaaggacgatgaatcggaaaaacgttgtaagcaactattcaaggacctgaacattgaaaagatctactttgattacgaagaagacactggtgccaaattgagaaaacaaattgagcagatcgacgaatcaagaggattgaagaaagaggttttaacatccttcttaaacaaggtctacaaacgttccaagggcggaggtggttctggtgggggtggttcgggtggtggtgggtcaggtggtggcggtagcggtggcggtggttccggtggtggtggtagtggaggtgggggttcttcagccgggagcgaccagatagaaggaagtcctcatcacgagtctgataactccattgcgacaaaaatcctgaatttcggtcatacgtgctggaagttacaaaggccctatgtcgtgaaaggtatgatttcgatagcttgtggcttgtttggtcgcgaactatttcataataccaaccttttatcttggtcattgatgctcaaggcattctcatccttaatggtaatcctttcttttaatttctttgctgccataatgaatcaaatttacgatgttgatattgaccgaattaacaaaccagatttgccactcgttagtggagagatgagtatcgaaactgcatggatactatcgatcattgtcgctctgacaggcttaatattgactattaagcttaattgtggtccgctatttatatcattgtattgcgtatctattttcgctggatttgcatacagcgttcctccaattcgttggaaacagtatcctttcaccaacttcttaataactatcagctcacacgtgggtgttaactttacatgttattacgcctccagagcagcctttggcttacccttcgaaatgtctccgccatttacttttattctcgcttttatgaccgtaatgggaatgacaatagctttcgcgaaagacatttcagatatcgaaggtgatgcgaaatatggggtgtctactgttgctacgaagttaggtgcaagaaatatgacgtttgttgtcagtggtgtcttgttgctgacatacgtaagcgctatacttgcagctatcatttggccgcaagcctttaagtcaaatgtgatgttgttatctcatgccatcctggcgttctgcctaattttccaaactagagagctagcgcttgcaaattatgcttctgcacctagtaggcagttttttgaatttatctggaaattgcattatgcagagtacttagtttatgttttcatctaa

SEQ ID NO: 636 - protein, 719 aa, Cannabis sativa
MGKNYKSLDSVVASDFIALGITSEVAETLHGRLAEIVCNYGAATPQTWINIANHILSPDLPFSLHQMLFYGCYKDFGPAPPAWIPDPEKVKSTNLGALLEKRGKEFLGVKYKDPISSFSHFQEFSVRNPEVYWRTVLMDEMKISFSKDPECILRRDDINNPGGSEWLPGGYLNSAKNCLNVNSNKKLNDTMIVWRDEGNDDLPLNKLTLDQLRKRVWLVGYALEEMGLEKGCAIAIDMPMHVDAVVIYLAIVLAGYVVVSIADSFSAPEISTRLRLSKAKAIFTQDHIIRGKKRIPLYSRVVEAKSPMAIVIPCSGSNIGAELRDGDISWDYFLERAKEFKNCEFTAREQPVDAYTNILFSSGTTGEPKAIPWTQATPLKAAADGWSHLDIRKGDVIVWPTNLGWMMGPWLVYASLLNGASIALYNGSPLVSGFAKFVQDAKVTMLGVVPSIVRSWKSTNCVSGYDWSTIRCFSSSGEASNVDEYLWLMGRANYKPVIEMCGGTEIGGAFSAGSFLQAQSLSSFSSQCMGCTLYILDKNGYPMPKNKPGIGELALGPVMFGASKTLLNGNHHDVYFKGMPTLNGEVLRRHGDIFELTSNGYYHAHGRADDTMNIGGIKISSIEIERVCNEVDDRVFETTAIGVPPLGGGPEQLVIFFVLKDSNDTTIDLNQLRLSFNLGLQKKLNPLFKVTRVVPLSSLPRTATNKIMRRVLRQFSHFE

SEQ ID NO: 637 - protein, 543 aa, Cannabis sativa
MEKSGYGRDGIYRSLRPPLHLPNNNNLSMVSFLFRNSSSYPQKPALIDSETNQILSFSHFKSTVIKVSHGFLNLGIKKNDVVLIYAPNSIHFPVCFLGIIASGAIATTSNPLYTVSELSKQVKDSNPKLIITVPQLLEKVKGFNLPTILIGPDSEQESSSDKVMTFNDLVNLGGSSGSEFPIVDDFKQSDTAALLYSSGTTGMSKGVVLTHKNFIASSLMVTMEQDLVGEMDNVFLCFLPMFHVFGLAIITYAQLQRGNTVISMARFDLEKMLKDVEKYKVTHLWVVPPVILALSKNSMVKKFNLSSIKYIGSGAAPLGKDLMEECSKVVPYGIVAQGYGMTETCGIVSMEDIRGGKRNSGSAGMLASGVEAQIVSVDTLKPLPPNQLGEIWVKGPNMMQGYFNNPQATKLTIDKKGWVHTGDLGYFDEDGHLYVVDRIKELIKYKGFQVAPAELEGLLVSHPEILDAVVIPFPDAEAGEVPVAYVVRSPNSSLTENDVKKFIAGQVASFKRLRKVTFINSVPKSASGKILRRELIQKVRSNM

SEQ ID NO: 638 - protein, 385 aa, Cannabis sativa
MNHLRAEGPASVLAIGTANPENILLQDEFPDYYFRVTKSEHMTQLKEKFRKICDKSMIRKRNCFLNEEHLKQNPRLVEHEMQTLDARQDMLVVEVPKLGKDACAKAIKEWGQPKSKITHLIFTSASTTDMPGADYHCAKLLGLSPSVKRVMMYQLGCYGGGTVLRIAKDIAENNKGARVLAVCCDIMACLFRGPSESDLELLVGQAIFGDGAAAVIVGAEPDESVGERPIFELVSTGQTILPNSEGTIGGHIREAGLIFDLHKDVPMLISNNIEKCLIEAFTPIGISDWNSIFWITHPGGKAILDKVEEKLHLKSDKFVDSRHVLSEHGNMSSSTVLFVMDELRKRSLEEGKSTTGDGFEWGVLFGFGPGLTVERVVVRSVPIKY

SEQ ID NO: 639 - protein, 101 aa, Cannabis sativa
MAVKHLIVLKFKDEITEAQKEEFFKTYVNLVNIIPAMKDVYWGKDVTQKNKEEGYTHIVEVTFESVETIQDYIIHPAHVGFGDVYRSFWEKLLIFDYTPRK

SEQ ID NO: 640 - DNA, 303 bp, Cannabis sativa
atggcagtgaagcatttgattgtattgaagttcaaagatgaaatcacagaagcccaaaaggaagaatttttcaagacgtatgtgaatcttgtgaatatcatcccagccatgaaagatgtatactggggtaaagatgtgactcaaaagaataaggaagaagggtacactcacatagttgaggtaacatttgagagtgtggagactattcaggactacattattcatcctgcccatgttggatttggagatgtctatcgttctttctgggaaaaacttctcatttttgactacacaccacgaaag

SEQ ID NO: 641 - protein, 545 aa, Cannabis sativa
MNCSAFSFWFVCKIIFFFLSFNIQISIANPQENFLKCFSEYIPNNPANPKFIYTQHDQLYMSVLNSTIQNLRFTSDTTPKPLVIVTPSNVSHIQASILCSKKVGLQIRTRSGGHDAEGMSYISQVPFVVVDLRNMHSIKIDVHSQTAWVEAGATLGEVYYWINEKNENFSFPGGYCPTVGVGGHFSGGGYGALMRNYGLAADNIIDAHLVNVDGKVLDRKSMGEDLFWAIRGGGGENFGIIAAWKIKLVAVPSKSTIFSVKKNMEIHGLVKLFNKWQNIAYKYDKDLVLMTHFITKNITDNHGKNKTTVHGYFSSIFHGGVDSLVDLMNKSFPELGIKKTDCKEFSWIDTTIFYSGVVNFNTANFKKEILLDRSAGKKTAFSIKLDYVKKPIPETAMVKILEKLYEEDVGVGMYVLYPYGGIMEEISESAIPFPHRAGIMYELWYTASWEKQEDNEKHINWVRSVYNFTTPYVSQNPRLAYLNYRDLDLGKTNPESPNNYTQARIWGEKYFGKNFNRLVKVKTKADPNNFFRNEQSIPPLPPHHH

SEQ ID NO: 642 - protein, 517 aa, Artificial Sequence
  Synthetic
NPQENFLKCFSEYIPNNPANPKFIYTQHDQLYMSVLNSTIQNLRFTSDTTPKPLVIVTPSNVSHIQASILCSKKVGLQIRTRSGGHDAEGMSYISQVPFVVVDLRNMHSIKIDVHSQTAWVEAGATLGEVYYWINEKNENFSFPGGYCPTVGVGGHFSGGGYGALMRNYGLAADNIIDAHLVNVDGKVLDRKSMGEDLFWAIRGGGGENFGIIAAWKIKLVAVPSKSTIFSVKKNMEIHGLVKLFNKWQNIAYKYDKDLVLMTHFITKNITDNHGKNKTTVHGYFSSIFHGGVDSLVDLMNKSFPELGIKKTDCKEFSWIDTTIFYSGVVNFNTANFKKEILLDRSAGKKTAFSIKLDYVKKPIPETAMVKILEKLYEEDVGVGMYVLYPYGGIMEEISESAIPFPHRAGIMYELWYTASWEKQEDNEKHINWVRSVYNFTTPYVSQNPRLAYLNYRDLDLGKTNPESPNNYTQARIWGEKYFGKNFNRLVKVKTKADPNNFFRNEQSIPPLPPHHH

SEQ ID NO: 643 - DNA, 1551 bp, Artificial Sequence
  Synthetic
aacccgcaagaaaactttctaaaatgcttttctgaatacattcctaacaaccctgccaacccgaagtttatctacacacaacacgatcaattgtatatgagcgtgttgaatagtacaatacagaacctgaggtttacatccgacacaacgccgaaaccgctagtgatcgtcacaccctccaacgtaagccacattcaggcaagcattttatgcagcaagaaagtcggactgcagataaggacgaggtccggaggacacgacgccgaagggatgagctatatctcccaggtaccttttgtggtggtagacttgagaaatatgcactctatcaagatagacgttcactcccaaaccgcttgggttgaggcgggagccacccttggtgaggtctactactggatcaacgaaaagaatgaaaattttagctttcctgggggatattgcccaactgtaggtgttggcggccacttctcaggaggcggttatggggccttgatgcgtaactacggacttgcggccgacaacattatagacgcacatctagtgaatgtagacggcaaagttttagacaggaagagcatgggtgaggatcttttttgggcaattagaggcggagggggagaaaattttggaattatcgctgcttggaaaattaagctagttgcggtaccgagcaaaagcactatattctctgtaaaaaagaacatggagatacatggtttggtgaagctttttaataagtggcaaaacatcgcgtacaagtacgacaaagatctggttctgatgacgcattttataacgaaaaatatcaccgacaaccacggaaaaaacaaaaccacagtacatggctacttctctagtatatttcatgggggagtcgattctctggttgatttaatgaacaaatcattcccagagttgggtataaagaagacagactgtaaggagttctcttggattgacacaactatattctattcaggcgtagtcaactttaacacggcgaatttcaaaaaagagatccttctggacagatccgcaggtaagaaaactgcgttctctatcaaattggactatgtgaagaagcctattcccgaaaccgcgatggtcaagatacttgagaaattatacgaggaagatgtgggagttggaatgtacgtactttatccctatggtgggataatggaagaaatcagcgagagcgccattccatttccccatcgtgccggcatcatgtacgagctgtggtatactgcgagttgggagaagcaagaagacaacgaaaagcacattaactgggtcagatcagtttacaatttcaccaccccatacgtgtcccagaatccgcgtctggcttacttgaactaccgtgatcttgacctgggtaaaacgaacccggagtcacccaacaattacactcaagctagaatctggggagagaaatactttgggaagaacttcaacaggttagtaaaggttaaaaccaaggcagatccaaacaacttttttagaaatgaacaatccattcccccgctacccccgcaccatcac

SEQ ID NO: 644 - protein, 545 aa, Cannabis sativa
MNCSAFSFWFVCKIIFFFLSFHIQISIANPRENFLKCFSKHIPNNVANPKLVYTQHDQLYMSILNSTIQNLRFISDTTPKPLVIVTPSNNSHIQATILCSKKVGLQIRTRSGGHDAEGMSYISQVPFVVVDLRNMHSIKIDVHSQTAWVEAGATLGEVYYWINEKNENLSFPGGYCPTVGVGGHFSGGGYGALMRNYGLAADNIIDAHLVNVDGKVLDRKSMGEDLFWAIRGGGGENFGIIAAWKIKLVAVPSKSTIFSVKKNMEIHGLVKLFNKWQNIAYKYDKDLVLMTHFITKNITDNHGKNKTTVHGYFSSIFHGGVDSLVDLMNKSFPELGIKKTDCKEFSWIDTTIFYSGVVNFNTANFKKEILLDRSAGKKTAFSIKLDYVKKPIPETAMVKILEKLYEEDVGAGMYVLYPYGGIMEEISESAIPFPHRAGIMYELWYTASWEKQEDNEKHINWVRSVYNFTTPYVSQNPRLAYLNYRDLDLGKTNHASPNNYTQARIWGEKYFGKNFNRLVKVKTKVDPNNFFRNEQSIPPLPPHHH

SEQ ID NO: 645 - protein, 544 aa, Cannabis sativa
MKCSTFSFWFVCKIIFFFFSFNIQTSIANPRENFLKCFSQYIPNNATNLKLVYTQNNPLYMSVLNSTIHNLRFTSDTTPKPLVIVTPSHVSHIQGTILCSKKVGLQIRTRSGGHDSEGMSYISQVPFVIVDLRNMRSIKIDVHSQTAWVEAGATLGEVYYWVNEKNENLSLAAGYCPTVCAGGHFGGGGYGPLMRNYGLAADNIIDAHLVNVHGKVLDRKSMGEDLFWALRGGGAESFGIIVAWKIRLVAVPKSTMFSVKKIMEIHELVKLVNKWQNIAYKYDKDLLLMTHFITRNITDNQGKNKTAIHTYFSSVFLGGVDSLVDLMNKSFPELGIKKTDCRQLSWIDTIIFYSGVVNYDTDNFNKEILLDRSAGQNGAFKIKLDYVKKPIPESVFVQILEKLYEEDIGAGMYALYPYGGIMDEISESAIPFPHRAGILYELWYICSWEKQEDNEKHLNWIRNIYNFMTPYVSKNPRLAYLNYRDLDIGINDPKNPNNYTQARIWGEKYFGKNFDRLVKVKTLVDPNNFFRNEQSIPPLPRHRH

SEQ ID NO: 646 - protein, 545 aa, Cannabis sativa
MNCSTFSFWFVCKIIFFFLSFNIQISIANPQENFLKCFSEYIPNNPANPKFIYTQHDQLYMSVLNSTIQNLRFTSDTTPKPLVIVTPSNVSHIQASILCSKKVGLQIRTRSGGHDAEGLSYISQVPFAIVDLRNMHTVKVDIHSQTAWVEAGATLGEVYYWINEMNENFSFPGGYCPTVGVGGHFSGGGYGALMRNYGLAADNIIDAHLVNVDGKVLDRKSMGEDLFWAIRGGGGENFGIIAACKIKLVVVPSKATIFSVKKNMEIHGLVKLFNKWQNIAYKYDKDLMLTTHFRTRNITDNHGKNKTTVHGYFSSIFLGGVDSLVDLMNKSFPELGIKKTDCKELSWIDTTIFYSGVVNYNTANFKKEILLDRSAGKKTAFSIKLDYVKKLIPETAMVKILEKLYEEEVGVGMYVLYPYGGIMDEISESAIPFPHRAGIMYELWYTATWEKQEDNEKHINWVRSVYNFTTPYVSQNPRLAYLNYRDLDLGKTNPESPNNYTQARIWGEKYFGKNFNRLVKVKTKADPNNFFRNEQSIPPLPPRHH

SEQ ID NO: 647 - protein, 8 aa, Artificial Sequence
  Synthetic
VPGGKLNR

SEQ ID NO: 648 - protein, 10 aa, Artificial Sequence
  Synthetic
  misc_feature (9)..(9): Xaa may be L or M
FYLPVALAXH

SEQ ID NO: 649 - protein, 10 aa, Artificial Sequence
  Synthetic
FYLPVALALH

SEQ ID NO: 650 - protein, 10 aa, Artificial Sequence
  Synthetic
FYLPVALAMH

SEQ ID NO: 651 - protein, 9 aa, Artificial Sequence
  Synthetic
  misc_feature (2)..(2): Xaa may be E or H
  misc_feature (4)..(4): Xaa may be I or V
AXDXLIPLG

SEQ ID NO: 652 - protein, 9 aa, Artificial Sequence
  Synthetic
AEDILIPLG

SEQ ID NO: 653 - protein, 9 aa, Artificial Sequence
  Synthetic
AHDILIPLG

SEQ ID NO: 654 - protein, 9 aa, Artificial Sequence
  Synthetic
AHDVLIPLG

SEQ ID NO: 655 - protein, 13 aa, Artificial Sequence
  Synthetic
  misc_feature (4)..(4): Xaa may be C or L
  misc_feature (5)..(5): Xaa may be I, T or V
  misc_feature (11)..(11): Xaa may be F or Y
LGWXXELLQAXFL

SEQ ID NO: 656 - protein, 13 aa, Artificial Sequence
  Synthetic
LGWLTELLQAYFL

SEQ ID NO: 657 - protein, 13 aa, Artificial Sequence
  Synthetic
LGWLTELLQAFFL

SEQ ID NO: 658 - protein, 13 aa, Artificial Sequence
  Synthetic
LGWCIELLQAYFL

SEQ ID NO: 659 - protein, 13 aa, Artificial Sequence
  Synthetic
LGWCVELLQAYFL

SEQ ID NO: 660 - protein, 13 aa, Artificial Sequence
  Synthetic
LGWCVELLQAFFL

SEQ ID NO: 661 - protein, 13 aa, Artificial Sequence
  Synthetic
LGWCIELLQAFFL

SEQ ID NO: 662 - protein, 13 aa, Artificial Sequence
  Synthetic
LGWCTELLQAFFL

SEQ ID NO: 663 - protein, 14 aa, Artificial Sequence
  Synthetic
  misc_feature (5)..(5): Xaa may be F or L
  misc_feature (6)..(6): Xaa may be E or T
  misc_feature (7)..(7): Xaa may be S or A
  misc_feature (10)..(10): Xaa may be A, G or N
KKEVXXXFLXKIYK

SEQ ID NO: 664 - protein, 14 aa, Artificial Sequence
  Synthetic
KKEVFESFLAKIYK

SEQ ID NO: 665 - protein, 14 aa, Artificial Sequence
  Synthetic
KKEVFEAFLGKIYK

SEQ ID NO: 666 - protein, 14 aa, Artificial Sequence
  Synthetic
KKEVLTSFLNKIYK

SEQ ID NO: 667 - protein, 10 aa, Artificial Sequence
  Synthetic
  misc_feature (4)..(4): Xaa may be V or I
  misc_feature (6)..(6): Xaa may be D or E
QRKXLXENYG

SEQ ID NO: 668 - protein, 10 aa, Artificial Sequence
  Synthetic
QRKVLDENYG

SEQ ID NO: 669 - protein, 10 aa, Artificial Sequence
  Synthetic
QRKILDENYG

SEQ ID NO: 670 - protein, 10 aa, Artificial Sequence
  Synthetic
QRKILEENYG

SEQ ID NO: 671 - protein, 10 aa, Artificial Sequence
  Synthetic
QRKVLEENYG

SEQ ID NO: 672 - protein, 8 aa, Artificial Sequence
  Synthetic
VGMIAIWD

SEQ ID NO: 673 - protein, 10 aa, Artificial Sequence
  Synthetic
  misc_feature (4)..(4): Xaa may be Q or K
TDIXDNKCSW

SEQ ID NO: 674 - protein, 10 aa, Artificial Sequence
  Synthetic
TDIQDNKCSW

SEQ ID NO: 675 - protein, 10 aa, Artificial Sequence
  Synthetic
TDIKDNKCSW

SEQ ID NO: 676 - protein, 9 aa, Artificial Sequence
  Synthetic
TAYYSFYLP

SEQ ID NO: 677 - protein, 14 aa, Artificial Sequence
  Synthetic
  misc_feature (8)..(8): Xaa may be Q or K
GKIGTDIXDNKCSW

SEQ ID NO: 678 - protein, 14 aa, Artificial Sequence
  Synthetic
GKIGTDIQDNKCSW

SEQ ID NO: 679 - protein, 14 aa, Artificial Sequence
  Synthetic
GKIGTDIKDNKCSW

SEQ ID NO: 680 - protein, 10 aa, Artificial Sequence
  Synthetic
  misc_feature (5)..(5): Xaa may be L or M
ILIPXGEYFQ

SEQ ID NO: 681 - protein, 10 aa, Artificial Sequence
  Synthetic
ILIPLGEYFQ

SEQ ID NO: 682 - protein, 10 aa, Artificial Sequence
  Synthetic
ILIPMGEYFQ

SEQ ID NO: 683 - protein, 10 aa, Artificial Sequence
  Synthetic
  misc_feature (3)..(3): Xaa may be V or M
  misc_feature (4)..(4): Xaa may be E or P
  misc_feature (5)..(5): Xaa may be M or L
  misc_feature (7)..(7): Xaa may be E or T
  misc_feature (8)..(8): Xaa may be Y or F
ILXXXGXXFQ

SEQ ID NO: 684 - protein, 10 aa, Artificial Sequence
  Synthetic
ILVPMGEYFQ

SEQ ID NO: 685 - protein, 8 aa, Artificial Sequence
  Synthetic
AKIYKRSK

SEQ ID NO: 686 - protein, 8 aa, Artificial Sequence
  Synthetic
DPEVIGKI

SEQ ID NO: 687 - protein, 11 aa, Artificial Sequence
  Synthetic
  misc_feature (7)..(7): Xaa may be Y or F
  misc_feature (11)..(11): Xaa may be E or Q
RGQPCWXRVPX

SEQ ID NO: 688 - protein, 11 aa, Artificial Sequence
  Synthetic
RGQPCWYRVPE

SEQ ID NO: 689 - protein, 14 aa, Artificial Sequence
  Synthetic
  misc_feature (8)..(8): Xaa may be Y or F
  misc_feature (10)..(10): Xaa may be S or T
IVKYKTAXYXFYLP

SEQ ID NO: 690 - protein, 14 aa, Artificial Sequence
  Synthetic
IVKYKTAFYSFYLP

SEQ ID NO: 691 - protein, 14 aa, Artificial Sequence
  Synthetic
IVKYKTAYYSFYLP

SEQ ID NO: 692 - protein, 14 aa, Artificial Sequence
  Synthetic
  misc_feature (3)..(3): Xaa may be I or V
  misc_feature (5)..(5): Xaa may be L or W
  misc_feature (9)..(9): Xaa may be Y or F
  misc_feature (10)..(10): Xaa may be W or F
  misc_feature (13)..(13): Xaa may be A, L or W
WCXEXLQAXXLVXD

SEQ ID NO: 693 - protein, 14 aa, Artificial Sequence
  Synthetic
WCIELLQAFFLVAD

SEQ ID NO: 694 - protein, 14 aa, Artificial Sequence
  Synthetic
WCIELLQAFWLVAD

SEQ ID NO: 695 - protein, 14 aa, Artificial Sequence
  Synthetic
WCIELLQAYFLVAD

SEQ ID NO: 696 - protein, 14 aa, Artificial Sequence
  Synthetic
WCIELLQAYWLVAD

SEQ ID NO: 697 - protein, 14 aa, Artificial Sequence
  Synthetic
WCIEWLQAFFLVAD

SEQ ID NO: 698 - protein, 14 aa, Artificial Sequence
  Synthetic
WCVELLQAYFLVAD

SEQ ID NO: 699 - protein, 16 aa, Artificial Sequence
  Synthetic
  misc_feature (6)..(6): Xaa may be V or N
  misc_feature (8)..(8): Xaa may be A or C
  misc_feature (10)..(10): Xaa may be A or Q
  misc_feature (11)..(11): Xaa may be R or I
  misc_feature (12)..(12): Xaa may be A or C
  misc_feature (13)..(13): Xaa may be S or T
  misc_feature (15)..(15): Xaa may be E or D
CSWLVXQXLXXXXPXQ

SEQ ID NO: 700 - protein, 16 aa, Artificial Sequence
  Synthetic
CSWLVVQALARATPEQ

SEQ ID NO: 701 - protein, 371 aa, Artificial sequence
  Synthetic
MSYVAYNVSRLRVWKVREKPCSAVFQPSSLKHCAKGSETFVFYQRPNERFLVKAAGGQPLESEPKNDMNSAKDALDAFYRFSRPHTVIGTALSIVSVSLLAIEKLSDFSPLFFVGMLEAIVAALLMNIYIVGLNQLYDIDIDKVNKPYLPLASGEYSIQTGVMIVASFSILSFGVGWLVGSWPLFWALFISFVLGTAYSINVPLLRWKRFALVAAMCILAVRAVIVQLAFFLHIQTHVFKRPAVFSRPLIFATAFMSFFSVVIALFKDIPDIDGDRIYGIRSFTVRLGQKRVFWICISLLEIAYTVALLVGASSGFLWSKVVTVLGHTILASILWTNAKSVDLSSKAAITSFYMFIWKLFYAEYLLIPLVR

SEQ ID NO: 702 - protein, 323 aa, Artificial Sequence
  Synthetic
MSTDTANQTEPPESNTKYSVVTKILSFGHTCWKLQRPYTFIGVISCACGLFGRELFHNTNLLSWSLMLKAFSSLMVILSVNLCTNIINQITDLDIDRINKPDLPLASGEMSIETAWIMSIIVALTGLILTIKLNCGPLFISLYCVSILVGALYSVPPFRWKQNPNTAFSSYFMGLVIVNFTCYYASRAAFGLPFEMSPPFTFILAFVKSMGSALFLCKDVSDIEGDSKHGISTLATRYGAKNITFLCSGIVLLTYVSAILAAIIWPQAFKSNVMLLSHATLAFWLIFQTREFALTNYNPEAGRKFYEFMWKLHYAEYLVYVFI

SEQ ID NO: 703 - skipped

SEQ ID NO: 704 - protein, 659 aa, Artificial Sequence
  Synthetic
MASEKEIRRERFLNVFPKLVEELNASLLAYGMPKEACDWYAHSLNYNTPGGKLNRGLSVVDTYAILSNKTVEQLGQEEYEKVAILGWCIELLQAYWLVADDMMDKSITRRGQPCWYKVPEVGEIAIWDAFMLEAAIYKLLKSHFRNEKYYIDITELFHEVTFQTELGQLMDLITAPEDKVDLSKFSLKKHSFIVTFKTAYYSFYLPVALAMYVAGITDEKDLKQARDVLIPLGEYFQIQDDYLDCFGTPEQIGKIGTDIQDNKCSWVINKALELASAEQRKTLDENYGKKDSVAEAKCKKIFNDLKIEQLYHEYEESIAKDLKAKISQVDESRGFKADVLTAFLNKVYKRSKGSGSGAADVERVYAAMEEAAGLLGVTCAREKIYPLLTEFQDTLTDGVVVFSMASGRRSTELDFSISVPTSQGDPYATVVDKGLFPATGHPVDDLLADTQKHLPVSMFAIDGEVTGGFKKTYAFFPTDDMPGVAQLSAIPSMPSSVAENAELFARYGLDKVQMTSMDYKKRQVNLYFSELSEQTLAPESVLALVRELGLHVPTELGLEFCKRSFSVYPTLNWDTGKIDRLCFSVISTDPTLVPSTDERDIEQFRHYGTKAPYAYVGENRTLVYGLTLSPTEEYYKLGAVYHITDIQRRLLKAFDALED

SEQ ID NO: 705-709 - skipped (5 entries)

SEQ ID NO: 710 - protein, 659 aa, Artificial Sequence
  Synthetic
MASEKEIRRERFLNVFPKLVEELNASLLAYGMPKEACDWYAHSLNYNTPGGKLNRGLSVVDTYAILSNKTVEQLGQEEYEKVAILGWCIELLQAYWLVADDMMDKSITRRGQPCWYKVPEVGEIAIWDAFMLEAAIYKLLKSHFRNEKYYIDITELFHEVTFQTELGQLMDLITAPEDKVDLSKFSLKKHSFIVTFKTAYYSFYLPVALAMYVAGITDEKDLKQARDVLIPLGEYFQIQDDYLDCFGTPEQIGKIGTDIQDNKCSWVINKALELASAEQRKTLDENYGKKDSVAEAKCKKIFNDLKIEQLYHEYEESIAKDLKAKISQVDESRGFKADVLTAFLNKVYKRSKGSGSEGMTAEELYSVIEESARLVAAPFSRDKVWPVLSAYRDGFGEGGVIFSLQAGEQVAEMEYTVQVSPGIEDPYACAVSNGFAAKTDHPVSTLLSEIQELVSGSEYYIDCGIVGGFKKIYANFPHSPQKVSKLAELPSMPRAVAANADFFARYGLEDVVLIGVDYKNRTMNLYFQLPPGTAGNLEPETVRSMLHETKMHEPSEKMLAYAAKSYRVYTTLSWESEDIHRISFSPRPRRDMDLSSLPARLEPRLEEFMRATPRKYAGDLINASAAKWSPHNEFLDLAAAYTISPMHLKALQAAGEAEG

SEQ ID NO: 711-723 - skipped (13 entries)

SEQ ID NO: 724 - protein, 661 aa, Artificial Sequence
  Synthetic
MASEKEIRRERFLNVFPKLVEELNASLLAYGMPKEACDWYAHSLNYNTPGGKLNRGLSVVDTYAILSNKTVEQLGQEEYEKVAILGWCIELLQAYWLVADDMMDKSITRRGQPCWYKVPEVGEIAIWDAFMLEAAIYKLLKSHFRNEKYYIDITELFHEVTFQTELGQLMDLITAPEDKVDLSKFSLKKHSFIVTFKTAYYSFYLPVALAMYVAGITDEKDLKQARDVLIPLGEYFQIQDDYLDCFGTPEQIGKIGTDIQDNKCSWVINKALELASAEQRKTLDENYGKKDSVAEAKCKKIFNDLKIEQLYHEYEESIAKDLKAKISQVDESRGFKADVLTAFLNKVYKRSKGSGSEAADVERVYAAMEEAAGLLGVACARDKIYPLLSTFQDTLVEGGSVVVFSMASGRHSTELDFSISVPTSHGDPYATVVEKGLFPATGHPVDDLLADTQKHLPVSMFAIDGEVTGGFKKTYAFFPTDNMPGVAELSAIPSMPPAVAENAELFARYGLDKVQMTSMDYKKRQVNLYFSELSAQTLEAESVLALVRELGLHVPNELGLKFCKRSFSVYPTLNWETGKIDRLCFAVISNDPTLVPSSDEGDIEKFHNYATKAPYAYVGEKRTLVYGLTLSPKEEYYKLSAAYHITDVQRGLLKAFDSLED

SEQ ID NO: 725-728 - skipped (4 entries)

SEQ ID NO: 729 - DNA, 1977 bp, Artificial Sequence
  Synthetic
atggcttcagaaaaagaaattaggagagagagattcttgaacgttttccctaaattagtagaggaattgaacgcatcgcttttggcttacggtatgcctaaggaagcatgtgactggtatgcccactcattgaactacaacactccaggcggtaagctaaatagaggtttgtccgttgtggacacgtatgctattctctccaacaagaccgttgaacaattggggcaagaagaatacgaaaaggttgccattctaggttggtgcattgagttgttgcaggcttactggttggtcgccgatgatatgatggacaagtccattaccagaagaggccaaccatgttggtacaaggttcctgaagttggggaaattgccatctgggacgcattcatgttagaggctgctatctacaagcttttgaaatctcacttcagaaacgaaaaatactacatagatatcaccgaattgttccatgaggtcaccttccaaaccgaattgggccaattgatggacttaatcactgcacctgaagacaaagtcgacttgagtaagttctccctaaagaagcactccttcatagttactttcaagactgcttactattctttctacttgcctgtcgcattggccatgtacgttgccggtatcacggatgaaaaggatttgaaacaagccagagatgtcttgattccattgggtgaatacttccaaattcaagatgactacttagactgcttcggtaccccagaacagatcggtaagatcggtacagatatccaagataacaaatgttcttgggtaatcaacaaggcattggaacttgcttccgcagaacaaagaaagactttagacgaaaattacggtaagaaggactcagtcgcagaagccaaatgcaaaaagattttcaatgacttgaaaattgaacagctataccacgaatatgaagagtctattgccaaggatttgaaggccaaaatttctcaggtcgatgagtctcgtggcttcaaagctgatgtcttaactgcgttcttgaacaaagtttacaagagaagcaaaggttctggaagcggagcagctgacgttgaacgtgtgtacgccgctatggaggaagctgccggcctgctaggtgtaacgtgtgctagagaaaaaatatatcccttgttaactgagtttcaggataccttgacagacggtgttgtcgtcttctctatggcttcgggtaggagatcaactgaacttgatttctccatctccgttcctacctctcaaggtgacccatacgctactgttgtcgataagggtttgtttccagcaaccggtcatcctgttgatgacttattggccgatactcaaaagcacttaccagtatctatgttcgctattgacggtgaagtcacaggcggttttaaaaagacctatgccttcttcccaactgatgatatgccaggtgtcgctcaattgtccgctattccatctatgccaagtagtgttgctgaaaacgctgaattgtttgccagatacggacttgacaaggttcaaatgacatctatggattacaaaaagagacaagtcaatttgtacttctcggaactgtcagaacaaaccctagcacctgagtccgtgttggccttggttagagaattaggtttgcacgttccaactgaattaggtttggaattttgcaagcgttctttctccgtttatcctaccctaaactgggatactggtaagatcgacagattgtgtttttcagtgatttctacagacccaaccctggtcccatctactgacgaaagagatatcgaacaattccgtcattacggtaccaaagccccctatgcttacgtcggagaaaatagaactcttgtttatggtttgacgttgtctccaactgaagagtactacaagctgggtgctgtctaccacataacagacattcagagaagattgttgaaggctttcgatgctttagaagat

SEQ ID NO: 730-734 - skipped (5 entries)

SEQ ID NO: 735 - DNA, 1977 bp, Artificial Sequence
  Synthetic
atggcttcagaaaaagaaattaggagagagagattcttgaacgttttccctaaattagtagaggaattgaacgcatcgcttttggcttacggtatgcctaaggaagcatgtgactggtatgcccactcattgaactacaacactccaggcggtaagctaaatagaggtttgtccgttgtggacacgtatgctattctctccaacaagaccgttgaacaattggggcaagaagaatacgaaaaggttgccattctaggttggtgcattgagttgttgcaggcttactggttggtcgccgatgatatgatggacaagtccattaccagaagaggccaaccatgttggtacaaggttcctgaagttggggaaattgccatctgggacgcattcatgttagaggctgctatctacaagcttttgaaatctcacttcagaaacgaaaaatactacatagatatcaccgaattgttccatgaggtcaccttccaaaccgaattgggccaattgatggacttaatcactgcacctgaagacaaagtcgacttgagtaagttctccctaaagaagcactccttcatagttactttcaagactgcttactattctttctacttgcctgtcgcattggccatgtacgttgccggtatcacggatgaaaaggatttgaaacaagccagagatgtcttgattccattgggtgaatacttccaaattcaagatgactacttagactgcttcggtaccccagaacagatcggtaagatcggtacagatatccaagataacaaatgttcttgggtaatcaacaaggcattggaacttgcttccgcagaacaaagaaagactttagacgaaaattacggtaagaaggactcagtcgcagaagccaaatgcaaaaagattttcaatgacttgaaaattgaacagctataccacgaatatgaagagtctattgccaaggatttgaaggccaaaatttctcaggtcgatgagtctcgtggcttcaaagctgatgtcttaactgcgttcttgaacaaagtttacaagagaagcaaaggttctggatcagaaggcatgacagctgaggaactatattccgtaatcgaagaaagtgcacgtttggtcgctgccccattctctagggataaggtgtggcctgttttatctgcttacagagatggttttggtgagggtggagttatattcagcctgcaagccggtgaacaggtcgctgaaatggaatacacggttcaagtttcgccaggtattgaagacccctatgcttgcgctgtttctaatggttttgccgcaaaaactgaccatccagtctccactcttttgtctgagatccaagaattggtcagcggttcggaatactacattgattgtggtattgttggtggcttcaagaagatttatgctaacttcccacactcccctcaaaaagtctctaagttggcagaattaccatcaatgccaagagctgtagctgccaacgctgactttttcgccagatacggtttggaagatgttgttctaatcggtgtcgattataagaatagaaccatgaacttgtacttccaattacctccaggtaccgcaggaaatttggaaccagaaaccgtcagaagtatgcttcacgaaactaaaatgcatgaaccatctgagaagatgttagcttacgctgccaaatcctacagagtttacactactttgtcttgggagtccgaagacatccacagaatttcttttagcccaagaccccgtagagatatggaccttagttctttaccagctaggttggaacctcgtttggaagagttcatgagggctacaccaagaaagtacgccggtgacttaatcaacgcttcagctgccaagtggagtcctcataacgaatttttggacttggctgctgcatataccatatccccaatgcacttgaaggctcttcaggctgccggtgaagccgaaggt

SEQ ID NO: 736-748 - skipped (13 entries)

SEQ ID NO: 749 - DNA, 1983 bp, Artificial Sequence
  Synthetic
atggcttcagaaaaagaaattaggagagagagattcttgaacgttttccctaaattagtagaggaattgaacgcatcgcttttggcttacggtatgcctaaggaagcatgtgactggtatgcccactcattgaactacaacactccaggcggtaagctaaatagaggtttgtccgttgtggacacgtatgctattctctccaacaagaccgttgaacaattggggcaagaagaatacgaaaaggttgccattctaggttggtgcattgagttgttgcaggcttactggttggtcgccgatgatatgatggacaagtccattaccagaagaggccaaccatgttggtacaaggttcctgaagttggggaaattgccatctgggacgcattcatgttagaggctgctatctacaagcttttgaaatctcacttcagaaacgaaaaatactacatagatatcaccgaattgttccatgaggtcaccttccaaaccgaattgggccaattgatggacttaatcactgcacctgaagacaaagtcgacttgagtaagttctccctaaagaagcactccttcatagttactttcaagactgcttactattctttctacttgcctgtcgcattggccatgtacgttgccggtatcacggatgaaaaggatttgaaacaagccagagatgtcttgattccattgggtgaatacttccaaattcaagatgactacttagactgcttcggtaccccagaacagatcggtaagatcggtacagatatccaagataacaaatgttcttgggtaatcaacaaggcattggaacttgcttccgcagaacaaagaaagactttagacgaaaattacggtaagaaggactcagtcgcagaagccaaatgcaaaaagattttcaatgacttgaaaattgaacagctataccacgaatatgaagagtctattgccaaggatttgaaggccaaaatttctcaggtcgatgagtctcgtggcttcaaagctgatgtcttaactgcgttcttgaacaaagtttacaagagaagcaaaggttctggatcagaagccgcagatgtcgaaagagtttacgccgctatggaagaagccgccggtttgttaggtgttgcctgtgccagagataagatctacccattgttgtctacttttcaagatacattagttgaaggtggttcagttgttgttttctctatggcttcaggtagacattctacagaattggatttctctatctcagttccaacatcacatggtgatccatacgctactgttgttgaaaaaggtttatttccagcaacaggtcatccagttgatgatttgttggctgatactcaaaagcatttgccagtttctatgtttgcaattgatggtgaagttactggtggtttcaagaaaacttacgctttctttccaactgataacatgccaggtgttgcagaattatctgctattccatcaatgccaccagctgttgcagaaaatgcagaattatttgctagatacggtttggataaggttcaaatgacatctatggattacaagaaaagacaagttaatttgtacttttctgaattatcagcacaaactttggaagctgaatcagttttggcattagttagagaattgggtttacatgttccaaacgaattgggtttgaagttttgtaaaagatctttctcagtttatccaactttaaactgggaaacaggcaagatcgatagattatgtttcgcagttatctctaacgatccaacattggttccatcttcagatgaaggtgatatcgaaaagtttcataactacgctactaaagcaccatatgcttacgttggtgaaaagagaacattagtttatggtttgactttatcaccaaaggaagaatactacaagttgagtgctgcttaccacattaccgacgtacaaagaggtttattgaaagcattcgatagtttagaagac

SEQ ID NO: 750-752 - skipped (3 entries)

SEQ ID NO: 753 - protein, 375 aa, Artificial Sequence
  Synthetic
MSSSLNPEIDGHTYKRQKTDDINSSDPKVARRAKFEAVFDVIAEELLSYVKGEGMPKDAVEWYEKVLYHNTPGGKLNRGMSVVDTVEILKGRQLEEEEYKNAAILGWCVELLQAYFLVADDIMDQSVTRRGQPCWYKMPNVGNIAIWDAFMLEAAIYHLLKKHFRQEKYYVDLIELFLETTFQTELGQLVDLITAPEDHVDLSKFSLEKHHLIVVYKTAYYSFYLPVALAMHMSGVEAKSAYDLALSILIPLGEYFQVQDDYLDCYGKPEHIGKIGTDILDNKCSWNVNTALKYATEEQRKILDENYGQKDSEKEAKIKALFSQEPISIPQRFEAYEKESYEKINGLIETVDEEGTGLKKEVFRSFLAKVYKRSK

SEQ ID NO: 754 - DNA, 1125 bp, Artificial Sequence
  Synthetic
atgtcttcatccctaaatccagaaatagatggccacacttataaacgtcaaaagaccgacgatattaactctagcgaccctaaggtggcaaggagagccaagtttgaggctgtcttcgatgtaatcgctgaagaattactttcgtacgttaaaggagaaggtatgccaaaggacgctgttgaatggtacgaaaaagtcttgtatcataacacgcccggtggtaagttgaacagaggtatgtctgttgtcgatactgttgaaattttgaagggtagacagctggaggaagaagaatacaagaatgccgctatcttaggttggtgtgtcgaattgcttcaagcttacttcttggttgcagacgatattatggatcaatccgtaaccagaagaggtcaaccatgctggtataaaatgcctaacgttggtaatatcgctatctgggacgcctttatgttggaagctgccatttaccacctattaaaaaagcatttccgtcaagaaaagtattacgtcgatttgattgagttgtttttagaaacaactttccaaaccgagttgggtcagttagttgacttgatcactgctccagaagaccacgtcgatttatccaagttttctttggaaaagcatcacctgattgttgtgtacaagaccgcttattacagtttctacctgccagttgccttggctatgcatatgtcaggcgttgaagccaaatctgcctacgacttagctttgagcatattgattccattgggtgagtatttccaagttcaagatgactacttggattgttacggtaagccagaacacattggaaagatcggtaccgacatattggataacaaatgtagttggaacgtaaacacagctttaaaatatgctactgaagaacaaagaaagatcttggatgagaattacggtcagaaagactccgaaaaggaagcaaagattaaggctctattctctcaagaacctatctcaattccacaaagatttgaagcctacgagaaggaatcctacgaaaaaataaatggtttaattgaaactgttgatgaggaaggtacaggattgaagaaggaagtctttagatctttcctagctaaggtttacaagagatctaaa

SEQ ID NO: 755 - protein, 732 aa, Artificial Sequence
  Synthetic
MSSSLNPEIDGHTYKRQKTDDINSSDPKVARRAKFEAVFDVIAEELLSYVKGEGMPKDAVEWYEKVLYHNTPGGKLNRGMSVVDTVEILKGRQLEEEEYKNAAILGWCVELLQAYFLVADDIMDQSVTRRGQPCWYKMPNVGNIAIWDAFMLEAAIYHLLKKHFRQEKYYVDLIELFLETTFQTELGQLVDLITAPEDHVDLSKFSLEKHHLIVVYKTAYYSFYLPVALAMHMSGVEAKSAYDLALSILIPLGEYFQVQDDYLDCYGKPEHIGKIGTDILDNKCSWNVNTALKYATEEQRKILDENYGQKDSEKEAKIKALFSQEPISIPQRFEAYEKESYEKINGLIETVDEEGTGLKKEVFRSFLAKVYKRSKGGGGSGGGGSGGGGSGGGGSGGGGSGGGGSGGGGSSAGSDQIEGSPHHESDNSIATKILNFGHTCWKLQRPYVVKGMISIACGLFGRELFHNTNLLSWSLMLKAFSSLMVILSFNFFAAIMNQIYDVDIDRINKPDLPLVSGEMSIETAWILSIIVALTGLILTIKLNCGPLFISLYCVSIFAGFAYSVPPIRWKQYPFTNFLITISSHVGVNFTCYYASRAAFGLPFEMSPPFTFILAFMTVMGMTIAFAKDISDIEGDAKYGVSTVATKLGARNMTFVVSGVLLLTYVSAILAAIIWPQAFKSNVMLLSHAILAFCLIFQTRELALANYASAPSRQFFEFIWKLHYAEYLVYVFI

SEQ ID NO: 756 - DNA, 2196 bp, Artificial Sequence
  Synthetic
atgtcttcatccctaaatccagaaatagatggccacacttataaacgtcaaaagaccgacgatattaactctagcgaccctaaggtggcaaggagagccaagtttgaggctgtcttcgatgtaatcgctgaagaattactttcgtacgttaaaggagaaggtatgccaaaggacgctgttgaatggtacgaaaaagtcttgtatcataacacgcccggtggtaagttgaacagaggtatgtctgttgtcgatactgttgaaattttgaagggtagacagctggaggaagaagaatacaagaatgccgctatcttaggttggtgtgtcgaattgcttcaagcttacttcttggttgcagacgatattatggatcaatccgtaaccagaagaggtcaaccatgctggtataaaatgcctaacgttggtaatatcgctatctgggacgcctttatgttggaagctgccatttaccacctattaaaaaagcatttccgtcaagaaaagtattacgtcgatttgattgagttgtttttagaaacaactttccaaaccgagttgggtcagttagttgacttgatcactgctccagaagaccacgtcgatttatccaagttttctttggaaaagcatcacctgattgttgtgtacaagaccgcttattacagtttctacctgccagttgccttggctatgcatatgtcaggcgttgaagccaaatctgcctacgacttagctttgagcatattgattccattgggtgagtatttccaagttcaagatgactacttggattgttacggtaagccagaacacattggaaagatcggtaccgacatattggataacaaatgtagttggaacgtaaacacagctttaaaatatgctactgaagaacaaagaaagatcttggatgagaattacggtcagaaagactccgaaaaggaagcaaagattaaggctctattctctcaagaacctatctcaattccacaaagatttgaagcctacgagaaggaatcctacgaaaaaataaatggtttaattgaaactgttgatgaggaaggtacaggattgaagaaggaagtctttagatctttcctagctaaggtttacaagagatctaaaggcggaggtggttctggtgggggtggttcgggtggtggtgggtcaggtggtggcggtagcggtggcggtggttccggtggtggtggtagtggaggtgggggttcttcagccgggagcgaccagatagaaggaagtcctcatcacgagtctgataactccattgcgacaaaaatcctgaatttcggtcatacgtgctggaagttacaaaggccctatgtcgtgaaaggtatgatttcgatagcttgtggcttgtttggtcgcgaactatttcataataccaaccttttatcttggtcattgatgctcaaggcattctcatccttaatggtaatcctttcttttaatttctttgctgccataatgaatcaaatttacgatgttgatattgaccgaattaacaaaccagatttgccactcgttagtggagagatgagtatcgaaactgcatggatactatcgatcattgtcgctctgacaggcttaatattgactattaagcttaattgtggtccgctatttatatcattgtattgcgtatctattttcgctggatttgcatacagcgttcctccaattcgttggaaacagtatcctttcaccaacttcttaataactatcagctcacacgtgggtgttaactttacatgttattacgcctccagagcagcctttggcttacccttcgaaatgtctccgccatttacttttattctcgcttttatgaccgtaatgggaatgacaatagctttcgcgaaagacatttcagatatcgaaggtgatgcgaaatatggggtgtctactgttgctacgaagttaggtgcaagaaatatgacgtttgttgtcagtggtgtcttgttgctgacatacgtaagcgctatacttgcagctatcatttggccgcaagcctttaagtcaaatgtgatgttgttatctcatgccatcctggcgttctgcctaattttccaaactagagagctagcgcttgcaaattatgcttctgcacctagtaggcagttttttgaatttatctggaaattgcattatgcagagtacttagtttatgttttcatc

SEQ ID NO: 757 - protein, 323 aa, Artificial Sequence
  Synthetic
MSAGSDQIEGSPHHESDNSIATKILNFGHTFWKLQRPYVVKGMISIACGLFGRELFHNTNLLSWSLMLKAFSSLMVILSFNGFAAIMNQIYDVEIDRINKPDLPLVSGEMSIETAWILSIIVALTGLILTIKLNCGPLFISLYCVSIFAGFAYSVPPIRWKQYPFTNFLITISSHVGVNFTCYYASRAAFGLPFEMSPPFTFILAFMTVMGMTIAFAKDISDIEGDAKYGVSTVATKLGARNMTRVVSGVLLLTYVSAILAAIIWPQAFKSNVMLLSHAILAFCLIFQTRELALANYASAPSRQFFEFIWKLHYAEYLVYVFI

SEQ ID NO: 758 - protein, 323 aa, Artificial Sequence
  Synthetic
MSAGSDQIEGSPHHESDNSIATKILNFGHTCWKLQRPYVVKGLISIACGLFGRELFHNTNLLSWSLMLKAFSSLMVILSFNFFAASMNQIYDVDIDRINKPDLPLVSGEMSIETAWILSIIVALTGLILTIKLNCGPLFISLYCVSLFAGFAYSVPPIRWKQYPFTNFLITISSHVGVNFTCYYASRAAFGLPFEMSPPFTFILAFMTVMGMTIAFAKDISDIEGDAKYGVSTVATKLGARNMTRVVSGVLLLTYVSAILAAIIWPQAFKSNVMLLSHAILAFCLIFQTRELALANYASAPSRQFFEFIWKLHYAEYLVYVFI

SEQ ID NO: 759 - protein, 323 aa, Artificial Sequence
  Synthetic
MSAGSDQIEGSPHHESDNSIATKILNFGHTFWKLQRPYVVKGVISIACGLFGKELLHNTNLISWSLMFKAFFALVPILSFNFFAAIVNQIYDVEIDRINKPDLPLVSGEMSIRTAWILSIIVALTGLIVTIKMKGGPLFVFIYILGIFAGFAYSVPPIRWKQYPFTNFLITISSHVGLAFTSYYASRAALGLPFELRPSFSFIIAFMTVMGMTIAFAKDISDIEGDAKYGVSTVATKLGARNMTWVVSGVLLLNYLVSILAGIIWPFAFNSNVMILSHAILAFCLIFRTRELALANYASAPSRQFFEFIWLLYYAEYLVYVFI

SEQ ID NO: 760 - protein, 323 aa, Artificial Sequence
  Synthetic
MSAGSDQIEGSPHHESDNSIATKILNFGHTFWKLQRPYVVKGLISIACGLFGKELLHNTNLISWSLMFKAFFALVPILSFNGFAAIMNQIYDVEIDRINKPDLPLVSGEMSIRTAWILSIIVALTGLIVTIKMKGGPLFVFIYITGIFAGFAYSVPPIRWKQYPFTNFLITISSHVGLAFTSYYASRAALGLPFELRPSFSFIIAFMTVMGMTIAFAKDISDIEGDAKYGVSTVATKLGARNMTRVVSGVLLLNYLVSILAGIIWPFAFNSNVMILSHAILAFCLIFRTRELALANYASAPSRQFFEFIWLLYYAEYLVYVFI

SEQ ID NO: 761 - protein, 323 aa, Artificial Sequence
  Synthetic
MSAGSDQIEGSPHHESDNSIATKILNFGHTCWKLQRPYVVKGLISIACGLFGKELLHNTNLISWSLMFKAFFALVPILSFNGFAAIMNQIYDVEIDRINKPDLPLVSGEMSIRTAWILSIIVALTGLIVTIKMKGGPLFVFIYISGIFAGFAYSVPPIRWKQYPFTNFLITISSHVGLAFTSYYASRAALGLPFELRPSFSFIIAFMTVMGMTIAFAKDISDIEGDAKYGVSTVATKLGARNMTRVVSGVLLLNYLVSILAGIIWPFAFNSNVMILSHAILAFCLIFRTRELALANYASAPSRQFFEFIWKLYYAEYLVYVFI

SEQ ID NO: 762 - protein, 323 aa, Artificial Sequence
  Synthetic
MSAGSDQIEGSPHHESDNSIATKILNFGHTFWKLQRPYVVKGVISIACGLFGKELLHNTNLISWSLMFKAFFALVPILSFNFFAAIVNQIYDVEIDRINKPDLPLVSGEMSIRTAWILSIIVALTGLIVTIKMKGGPLFVFIYIFGIFAGFAYSVPPIRWKQYPFTNFLITISSHVGLAFTSYYASRAALGLPFELRPSFSFIIAFMTVMGMTIAFAKDISDIEGDAKYGVSTVATKLGARNMTRVVSGVLLLNYLVSILAGIIWPFAFNSNVMILSHAILAFCLIFRTRELALANYASAPSRQFFEFIWNLYYAEYLVYVFI

SEQ ID NO: 763 - protein, 323 aa, Artificial Sequence
  Synthetic
MSAGSDQIEGSPHHESDNSIATKILNFGHTCWKLQRPYVVKGMISIACGLFGRELFHNTNLLSWSLMLKAFSSLMVILSFNFFAAAMNQIYDVEIDRINKPDLPLVSGEMSIETAWILSIIVALTGLILTIKLNCGPLFISLYCVSLFAGFAYSVPPIRWKQYPFTNFLITISSHVGVNFTCYYASRAAFGLPFEMSPPFTFILAFMTVMGMTIAFAKDISDIEGDAKYGVSTVATKLGARNMTRVVSGVLLLTYVSAILAAIIWPQAFKSNVMLLSHAILAFCLIFQTRELALANYASAPSRQFFEFIWKLHYAEYLVYVFI

SEQ ID NO: 764 - protein, 323 aa, Artificial Sequence
  Synthetic
MSAGSDQIEGSPHHESDNSIATKILNFGHTFWKLQRPYVVKGMISCACGLFGKELLHNTNLISWSLMFKAFFALVPILSFNFFAAAMNQIYDVEIDRINKPDLPLVSGEMSIRTAWILSIIVALTGLIVTIKMKGGPLFVFIYITGIFAGFAYSVPPIRWKQYPFTNFLITISSHVGLAFTSYYASRAALGLPFELRPSFSFIIAFMTVMGMTIAFAKDISDIEGDAKYGVSTVATKLGARNMTRVVSGVLLLNYLVSILAGIIWPFAFNSNVMILSHAILAFCLIFRTRELALANYASAPSRQFFEFIWLLYYAEYLVYVFI

SEQ ID NO: 765 - protein, 323 aa, Artificial Sequence
  Synthetic
MSAGSDQIEGSPHHESDNSIATKILNFGHTFWKLQRPYVVKGVISIACGLFGKELLHNTNLISWSLMFKAFFALVPILSFNFFAAIVNQIYDVEIDRINKPDLPLVSGEMSIETAWILSIIVALTGLIVTIKMKGGPLFVFIYITGIFAGFAYSVPPIRWKQYPFTNFLITISSHVGLAFTSYYASRAALGLPFELRPSFSFIIAFMTVMGMTIAFAKDISDIEGDAKYGVSTVATKLGARNMTRVVSGVLLLNYLVSILAGIIWPFAFNSNVMILSHAILAFCLIFRTRELALANYASAPSRQFFEFIWNLYYAEYLVYVFI

SEQ ID NO: 766 - protein, 323 aa, Artificial Sequence
  Synthetic
MSAGSDQIEGSPHHESDNSIATKILNFGHTFWKLQRPYVVKGMISIACGLFGKELLHNTNLISWSLMFKAFFALVPILSFNFFAAGMNQIYDVEIDRINKPDLPLVSGEMSIRTAWILSIIVALTGLIVTIKMKGGPLFVFIYITGIFAGFAYSVPPIRWKQYPFTNFLITISSHVGLAFTSYYASRAALGLPFELRPSFSFIIAFMTVMGMTIAFAKDISDIEGDAKYGVSTVATKLGARNMTWVVSGVLLLNYLVSILAGIIWPFAFNSNVMILSHAILAFCLIFRTRELALANYASAPSRQFFEFIWNLYYAEYLVYVFI

SEQ ID NO: 767 - protein, 323 aa, Artificial Sequence
  Synthetic
MSAGSDQIEGSPHHESDNSIATKILNFGHTCWKLQRPYVVKGMISIACGLFGRELFHNTNLLSWSLMLKAFSSLMVILSFNFFAAVMNQIYDVDIDRINKPDLPLVSGEMSIETAWILSIIVALTGLILTIKLNCGPLFISLYCVSIFAGFAYSVPPIRWKQYPFTNFLITISSHVGVNFTCYYASRAAFGLPFEMSPPFTFILAFMTVMGMTIAFAKDISDIEGDAKYGVSTVATKLGARNMTRVVSGVLLLTYVSAILAAIIWPQAFKSNVMLLSHAILAFCLIFQTRELALANYASAPSRQFFEFIWKLHYAEYLVYVFI

SEQ ID NO: 768 - protein, 323 aa, Artificial Sequence
  Synthetic
MSAGSDQIEGSPHHESDNSIATKILNFGHTFWKLQRPYVVKGMISCACGLFGKELLHNTNLISWSLMFKAFFALVPILSFNFFAAGMNQIYDVEIDRINKPDLPLVSGEMSIRTAWILSIIVALTGLIVTIKMKGGPLFVFIYIFGIFAGFAYSVPPIRWKQYPFTNFLITISSHVGLAFTSYYASRAALGLPFELRPSFSFIIAFMTVMGMTIAFAKDISDIEGDAKYGVSTVATKLGARNMTRVVSGVLLLNYLVSILAGIIWPFAFNSNVMILSHAILAFCLIFRTRELALANYASAPSRQFFEFIWNLYYAEYLVYVFI

SEQ ID NO: 769 - protein, 323 aa, Artificial Sequence
  Synthetic
MSAGSDQIEGSPHHESDNSIATKILNFGHTFWKLQRPYVVKGVISIACGLFGKELLHNTNLISWSLMFKAFFALVPILSFNFFAAIVNQIYDVEIDRINKPDLPLVSGEMSIRTAWILSIIVALTGLIVTIKMKGGPLFVFIYILGIFAGFAYSVPPIRWKQYPFTNFLITISSHVGLAFTSYYASRAALGLPFELRPSFSFIIAFMTVMGMTIAFAKDISDIEGDAKYGVSTVATKLGARNMTRVVSGVLLLNYLVSILAGIIWPQAFNSNVMILSHAILAFCLIFRTRELALANYASAPSRQFFEFIWRLYYAEYLVYVFI

SEQ ID NO: 770 - protein, 323 aa, Artificial Sequence
  Synthetic
MSAGSDQIEGSPHHESDNSIATKILNFGHTFWKLQRPYVVKGLISIACGLFGRELFHNTNLLSWSLMLKAFSSLMVILSFNFFAAAMNQIYDVDIDRINKPDLPLVSGEMSIETAWILSIIVALTGLILTIKLNCGPLFISLYCVSLFAGFAYSVPPIRWKQYPFTNFLITISSHVGVNFTCYYASRAAFGLPFEMSPPFTFILAFMTVMGMTIAFAKDISDIEGDAKYGVSTVATKLGARNMTFVVSGVLLLTYVSAILAAIIWPQAFKSNVMLLSHAILAFCLIFQTRELALANYASAPSRQFFEFIWKLHYAEYLVYVFI

SEQ ID NO: 771 - protein, 323 aa, Artificial Sequence
  Synthetic
MSAGSDQIEGSPHHESDNSIATKILNFGHTCWKLQRPYVVKGMISIACGLFGRELFHNTNLLSWSLMLKAFSSLMVILSFNFFAASMNQIYDVEIDRINKPDLPLVSGEMSIETAWILSIIVALTGLILTIKLNCGPLFISLYCVSIFAGFAYSVPPIRWKQYPFTNFLITISSHVGVNFTCYYASRAAFGLPFEMSPPFTFILAFMTVMGMTIAFAKDISDIEGDAKYGVSTVATKLGARNMTRVVSGVLLLTYVSAILAAIIWPQAFKSNVMLLSHAILAFCLIFQTRELALANYASAPSRQFFEFIWKLHYAEYLVYVFI

SEQ ID NO: 772 - protein, 323 aa, Artificial Sequence
  Synthetic
MSAGSDQIEGSPHHESDNSIATKILNFGHTFWKLQRPYVVKGLISIACGLFGKELLHNTNLISWSLMFKAFFALVPILSFNFFAASMNQIYDVEIDRINKPDLPLVSGEMSIRTAWILSIIVALTGLIVTIKMKGGPLFVFIYISGIFAGFAYSVPPIRWKQYPFTNFLITISSHVGLAFTSYYASRAALGLPFELRPSFSFIIAFMTVMGMTIAFAKDISDIEGDAKYGVSTVATKLGARNMTRVVSGVLLLNYLVSILAGIIWPFAFNSNVMILSHAILAFCLIFQTRELALANYASAPSRQFFEFIWKLYYAEYLVYVFI

SEQ ID NO: 773 - protein, 323 aa, Artificial Sequence
  Synthetic
MSAGSDQIEGSPHHESDNSIATKILNFGHTFWKLQRPYVVKGLISIACGLFGRELFHNTNLLSWSLMLKAFSSLMVILSFNFFAAVMNQIYDVEIDRINKPDLPLVSGEMSIETAWILSIIVALTGLILTIKLNCGPLFISLYCVSIFAGFAYSVPPIRWKQYPFTNFLITISSHVGVNFTCYYASRAAFGLPFEMSPPFTFILAFMTVMGMTIAFAKDISDIEGDAKYGVSTVATKLGARNMTFVVSGVLLLTYVSAILAAIIWPQAFKSNVMLLSHAILAFCLIFQTRELALANYASAPSRQFFEFIWKLHYAEYLVYVFI

SEQ ID NO: 774 - protein, 323 aa, Artificial Sequence
  Synthetic
MSAGSDQIEGSPHHESDNSIATKILNFGHTFWKLQRPYVVKGMISCACGLFGKELLHNTNLISWSLMFKAFFALVPILSFNGFAAIMNQIYDVEIDRINKPDLPLVSGEMSIRTAWILSIIVALTGLIVTIKMKGGPLFVFIYIFGLFAGFAYSVPPIRWKQYPFTNFLITISSHVGLAFTSYYASRAALGLPFELRPSFSFIIAFMTVMGMTIAFAKDISDIEGDAKYGVSTVATKLGARNMTFVVSGVLLLNYLVSILAGIIWPFAFNSNVMILSHAILAFCLIFRTRELALANYASAPSRQFFEFIWNLYYAEYLVYVFI

SEQ ID NO: 775 - protein, 323 aa, Artificial Sequence
  Synthetic
MSAGSDQIEGSPHHESDNSIATKILNFGHTFWKLQRPYVVKGLISIACGLFGRELFHNTNLLSWSLMLKAFSSLMVILSFNFFAAAMNQIYDVDIDRINKPDLPLVSGEMSIETAWILSIIVALTGLILTIKLNCGPLFISLYCVSIFAGFAYSVPPIRWKQYPFTNFLITISSHVGVNFTCYYASRAAFGLPFEMSPPFTFILAFMTVMGMTIAFAKDISDIEGDAKYGVSTVATKLGARNMTRVVSGVLLLTYVSAILAAIIWPQAFKSNVMLLSHAILAFCLIFQTRELALANYASAPSRQFFEFIWKLHYAEYLVYVFI

SEQ ID NO: 776 - protein, 323 aa, Artificial Sequence
  Synthetic
MSAGSDQIEGSPHHESDNSIATKILNFGHTFWKLQRPYVVKGMISIACGLFGRELFHNTNLLSWSLMLKAFSSLMVILSFNFFAAAMNQIYDVDIDRINKPDLPLVSGEMSIETAWILSIIVALTGLILTIKLNCGPLFISLYCVSIFAGFAYSVPPIRWKQYPFTNFLITISSHVGVNFTCYYASRAAFGLPFEMSPPFTFILAFMTVMGMTIAFAKDISDIEGDAKYGVSTVATKLGARNMTRVVSGVLLLTYVSAILAAIIWPQAFKSNVMLLSHAILAFCLIFQTRELALANYASAPSRQFFEFIWKLHYAEYLVYVFI

SEQ ID NO: 777 - protein, 323 aa, Artificial Sequence
  Synthetic
MSAGSDQIEGSPHHESDNSIATKILNFGHTFWKLQRPYVVKGLISIACGLFGKELLHNTNLISWSLMFKAFFALVPILSFNFFAASMNQIYDVDIDRINKPDLPLVSGEMSIRTAWILSIIVALTGLIVTIKMKGGPLFVFIYILGIFAGFAYSVPPIRWKQYPFTNFLITISSHVGLAFTSYYASRAALGLPFELRPSFSFIIAFMTVMGMTIAFAKDISDIEGDAKYGVSTVATKLGARNMTRVVSGVLLLNYLVSILAGIIWPFAFNSNVMILSHAILAFCLIFRTRELALANYASAPSRQFFEFIWRLYYAEYLVYVFI

SEQ ID NO: 778 - protein, 323 aa, Artificial Sequence
  Synthetic
MSAGSDQIEGSPHHESDNSIATKILNFGHTFWKLQRPYVVKGMISCACGLFGKELLHNTNLISWSLMFKAFFALVPILSFNFFAAIVNQIYDVEIDRINKPDLPLVSGEMSIRTAWILSIIVALTGLIVTIKMKGGPLFVFIYILGIFAGFAYSVPPIRWKQYPFTNFLITISSHVGLAFTSYYASRAALGLPFELRPSFSFIIAFMTVMGMTIAFAKDISDIEGDAKYGVSTVATKLGARNMTFVVSGVLLLNYLVSILAGIIWPFAFNSNVMILSHAILAFCLIFRTRELALANYASAPSRQFFEFIWNLYYAEYLVYVFI

SEQ ID NO: 779 - protein, 323 aa, Artificial Sequence
  Synthetic
MSAGSDQIEGSPHHESDNSIATKILNFGHTCWKLQRPYVVKGMISIACGLFGRELFHNTNLLSWSLMLKAFSSLMVILSFNFFAASMNQIYDVEIDRINKPDLPLVSGEMSIETAWILSIIVALTGLILTIKLNCGPLFISLYCVSIFAGFAYSVPPIRWKQYPFTNFLITISSHVGVNFTCYYASRAAFGLPFEMSPPFTFILAFMTVMGMTIAFAKDISDIEGDAKYGVSTVATKLGARNMTFVVSGVLLLTYVSAILAAIIWPQAFKSNVMLLSHAILAFCLIFQTRELALANYASAPSRQFFEFIWKLHYAEYLVYVFI

SEQ ID NO: 780 - protein, 323 aa, Artificial Sequence
  Synthetic
MSAGSDQIEGSPHHESDNSIATKILNFGHTCWKLQRPYVVKGMISIACGLFGRELFHNTNLLSWSLMLKAFSSLMVILSFNFFAATINQIYDVDIDRINKPDLPLVSGEMSIETAWILSIIVALTGLILTIKLNCGPLFISLYCVSIFAGTAYSVPPIRWKQYPFTNFLITISSHVGVNFTCYYASRAAFGLPFEMSPPFTFILAFMTVMGMTIAFAKDISDIEGDAKYGVSTVATKLGARNMTFVVSGVLLLTYVSAILAAIIWPQAFKSNVMLLSHAILAFCLIFQTRELALANYASAPSRQFFEFIWKLHYAEYLVYVFI

SEQ ID NO: 781 - protein, 323 aa, Artificial Sequence
  Synthetic
MSAGSDQIEGSPHHESDNSIATKILNFGHTCWKLQRPYVVKGLISIACGLFGRELFHNTNLLSWSLMLKAFSSLMVILSFNFFAASMNQIYDVEIDRINKPDLPLVSGEMSIETAWILSIIVALTGLILTIKLNCGPLFISLYCVSIFAGFAYSVPPIRWKQYPFTNFLITISSHVGVNFTCYYASRAAFGLPFEMSPPFTFILAFMTVMGMTIAFAKDISDIEGDAKYGVSTVATKLGARNMTFVVSGVLLLTYVSAILAAIIWPQAFKSNVMLLSHAILAFCLIFQTRELALANYASAPSRQFFEFIWKLHYAEYLVYVFI

SEQ ID NO: 782 - protein, 323 aa, Artificial Sequence
  Synthetic
MSAGSDQIEGSPHHESDNSIATKILNFGHTCWKLQRPYVVKGMISIACGLFGRELFHNTNLLSWSLMLKAFSSLMVILSFNFYAAATNQIYDVDIDRINKPDLPLVSGEMSIETAWILSIIVALTGLILTIKLNCGPLFISLYCVSIFAGFAYSVPPIRWKQYPFTNFLITISSHVGVNFTCYYASRAAFGLPFEMSPPFTFILAFMTVMGMTIAFAKDISDIEGDAKYGVSTVATKLGARNMTFVVSGVLLLTYVSAILAAIIWPQAFKSNVMLLSHAILAFCLIFQTRELALANYASAPSRQFFEFIWKLHYAEYLVYVFI

SEQ ID NO: 783 - protein, 323 aa, Artificial Sequence
  Synthetic
MSAGSDQIEGSPHHESDNSIATKILNFGHTFWKLQRPYVVKGLISIACGLFGKELLHNTNLISWSLMFKAFFALVPILSFNGFAAGMNQIYDVEIDRINKPDLPLVSGEMSIETAWILSIIVALTGLIVTIKMKGGPLFVFIYILGLFAGFAYSVPPIRWKQYPFTNFLITISSHVGLAFTSYYASRAALGLPFELRPSFSFIIAFMTVMGMTIAFAKDISDIEGDAKYGVSTVATKLGARNMTRVVSGVLLLNYLVSILAGIIWPQAFNSNVMILSHAILAFCLIFQTRELALANYASAPSRQFFEFIWNLYYAEYLVYVFI

SEQ ID NO: 784 - protein, 323 aa, Artificial Sequence
  Synthetic
MSAGSDQIEGSPHHESDNSIATKILNFGHTCWKLQRPYVVKGMISIACGLFGRELFHNTNLLSWSLMLKAFSSLMVILSFNFFAAVTNQIYDVDIDRINKPDLPLVSGEMSIETAWILSIIVALTGLILTIKLNCGPLFISLYCVSIFAGFAYSVPPIRWKQYPFTNFLITISSHVGVNFTCYYASRAAFGLPFEMSPPFTFILAFMTVMGMTIAFAKDISDIEGDAKYGVSTVATKLGARNMTFVVSGVLLLTYVSAILAAIIWPQAFKSNVMLLSHAILAFCLIFQTRELALANYASAPSRQFFEFIWKLHYAEYLVYVFI

SEQ ID NO: 785 - protein, 323 aa, Artificial Sequence
  Synthetic
MSAGSDQIEGSPHHESDNSIATKILNFGHTCWKLQRPYVVKGMISIACGLFGRELFHNTNLLSWSLMLKAFSSLMVILSFNFFAAVMNQIYDVDIDRINKPDLPLVSGEMSIETAWILSIIVALTGLILTIKLNCGPLFISLYCVSLFAGFAYSVPPIRWKQYPFTNFLITISSHVGVNFTCYYASRAAFGLPFEMSPPFTFILAFMTVMGMTIAFAKDISDIEGDAKYGVSTVATKLGARNMTRVVSGVLLLTYVSAILAAIIWPQAFKSNVMLLSHAILAFCLIFQTRELALANYASAPSRQFFEFIWKLHYAEYLVYVFI

SEQ ID NO: 786 - protein, 323 aa, Artificial Sequence
  Synthetic
MSAGSDQIEGSPHHESDNSIATKILNFGHTFWKLQRPYVVKGMISIACGLFGRELFHNTNLLSWSLMLKAFSSLMVILSFNFFAAVMNQIYDVEIDRINKPDLPLVSGEMSIETAWILSIIVALTGLILTIKLNCGPLFISLYCVSLFAGFAYSVPPIRWKQYPFTNFLITISSHVGVNFTCYYASRAAFGLPFEMSPPFTFILAFMTVMGMTIAFAKDISDIEGDAKYGVSTVATKLGARNMTFVVSGVLLLTYVSAILAAIIWPQAFKSNVMLLSHAILAFCLIFQTRELALANYASAPSRQFFEFIWKLHYAEYLVYVFI

SEQ ID NO: 787 - protein, 323 aa, Artificial Sequence
  Synthetic
MSAGSDQIEGSPHHESDNSIATKILNFGHTFWKLQRPYVVKGMISCACGLFGKELLHNTNLISWSLMFKAFFALVPILSFNFFAAAMNQIYDVDIDRINKPDLPLVSGEMSIRTAWILSIIVALTGLIVTIKMKGGPLFVFIYIFGLFAGFAYSVPPIRWKQYPFTNFLITISSHVGLAFTSYYASRAALGLPFELRPSFSFIIAFMTVMGMTIAFAKDISDIEGDAKYGVSTVATKLGARNMTWVVSGVLLLNYLVSILAGIIWPFAFNSNVMILSHAILAFCLIFRTRELALANYASAPSRQFFEFIWNLYYAEYLVYVFI

SEQ ID NO: 788 - protein, 323 aa, Artificial Sequence
  Synthetic
MSAGSDQIEGSPHHESDNSIATKILNFGHTCWKLQRPYVVKGMISIACGLFGRELFHNTNLLSWSLMLKAFSSLMVILSFNFFAAAINQIYDVDIDRINKPDLPLVSGEMSIETAWILSIIVALTGLILTIKLNCGPLFISLYCVSIFAGFAYSVPPIRWKQYPFTNFLITISSHVGVNFTCYYASRAAFGLPFEMSPPFTFILAFMTVMGMTIAFAKDISDIEGDAKYGVSTVATKLGARNMTFVVSGVLLLTYVSAILAAIIWPQAFKSNVMLLSHAILAFCLIFQTRELALANYASAPSRQFFEFIWKLHYAEYLVYVFI

SEQ ID NO: 789 - protein, 323 aa, Artificial Sequence
  Synthetic
MSAGSDQIEGSPHHESDNSIATKILNFGHTFWKLQRPYVVKGLISIACGLFGKELLHNTNLISWSLMFKAFFALVPILSFNFFAAAMNQIYDVEIDRINKPDLPLVSGEMSIRTAWILSIIVALTGLIVTIKMKGGPLFVFIYISGIFAGFAYSVPPIRWKQYPFTNFLITISSHVGLAFTSYYASRAALGLPFELRPSFSFIIAFMTVMGMTIAFAKDISDIEGDAKYGVSTVATKLGARNMTRVVSGVLLLNYLVSILAGIIWPFAFNSNVMILSHAILAFCLIFQTRELALANYASAPSRQFFEFIWKLYYAEYLVYVFI

SEQ ID NO: 790 - protein, 323 aa, Artificial Sequence
  Synthetic
MSAGSDQIEGSPHHESDNSIATKILNFGHTFWKLQRPYVVKGLISIACGLFGKELLHNTNLISWSLMFKAFFALVPILSFNFFAAGMNQIYDVEIDRINKPDLPLVSGEMSIRTAWILSIIVALTGLIVTIKMKGGPLFVFIYILGIFAGFAYSVPPIRWKQYPFTNFLITISSHVGLAFTSYYASRAALGLPFELRPSFSFIIAFMTVMGMTIAFAKDISDIEGDAKYGVSTVATKLGARNMTRVVSGVLLLNYLVSILAGIIWPQAFNSNVMILSHAILAFCLIFRTRELALANYASAPSRQFFEFIWRLYYAEYLVYVFI

SEQ ID NO: 791 - protein, 323 aa, Artificial Sequence
  Synthetic
MSAGSDQIEGSPHHESDNSIATKILNFGHTCWKLQRPYVVKGLISIACGLFGRELFHNTNLLSWSLMLKAFSSLMVILSFNFFAAAMNQIYDVEIDRINKPDLPLVSGEMSIETAWILSIIVALTGLILTIKLNCGPLFISLYCVSIFAGFAYSVPPIRWKQYPFTNFLITISSHVGVNFTCYYASRAAFGLPFEMSPPFTFILAFMTVMGMTIAFAKDISDIEGDAKYGVSTVATKLGARNMTFVVSGVLLLTYVSAILAAIIWPQAFKSNVMLLSHAILAFCLIFQTRELALANYASAPSRQFFEFIWKLHYAEYLVYVFI

SEQ ID NO: 792 - protein, 323 aa, Artificial Sequence
  Synthetic
MSAGSDQIEGSPHHESDNSIATKILNFGHTFWKLQRPYVVKGMISCACGLFGKELLHNTNLISWSLMFKAFFALVPILSFNFFAAGMNQIYDVEIDRINKPDLPLVSGEMSIRTAWILSIIVALTGLIVTIKMKGGPLFVFIYILGIFAGFAYSVPPIRWKQYPFTNFLITISSHVGLAFTSYYASRAALGLPFELRPSFSFIIAFMTVMGMTIAFAKDISDIEGDAKYGVSTVATKLGARNMTRVVSGVLLLNYLVSILAGIIWPQAFNSNVMILSHAILAFCLIFRTRELALANYASAPSRQFFEFIWNLYYAEYLVYVFI

SEQ ID NO: 793 - protein, 323 aa, Artificial Sequence
  Synthetic
MSAGSDQIEGSPHHESDNSIATKILNFGHTFWKLQRPYVVKGVISIACGLFGKELLHNTNLISWSLMFKAFFALVPILSFNFFAAGMNQIYDVDIDRINKPDLPLVSGEMSIRTAWILSIIVALTGLIVTIKMKGGPLFVFIYILGIFAGFAYSVPPIRWKQYPFTNFLITISSHVGLAFTSYYASRAALGLPFELRPSFSFIIAFMTVMGMTIAFAKDISDIEGDAKYGVSTVATKLGARNMTRVVSGVLLLNYLVSILAGIIWPFAFNSNVMILSHAILAFCLIFRTRELALANYASAPSRQFFEFIWKLYYAEYLVYVFI

SEQ ID NO: 794 - protein, 323 aa, Artificial Sequence
  Synthetic
MSAGSDQIEGSPHHESDNSIATKILNFGHTFWKLQRPYVVKGMISIACGLFGKELLHNTNLISWSLMFKAFFALVPILSFNGFAAVVNQIYDVEIDRINKPDLPLVSGEMSIETAWILSIIVALTGLIVTIKMKGGPLFVFIYILGLFAGFAYSVPPIRWKQYPFTNFLITISSHVGLAFTSYYASRAALGLPFELRPSFSFIIAFMTVMGMTIAFAKDISDIEGDAKYGVSTVATKLGARNMTRVVSGVLLLNYLVSILAGIIWPQAFNSNVMILSHAILAFCLIFQTRELALANYASAPSRQFFEFIWKLYYAEYLVYVFI

SEQ ID NO: 795 - protein, 323 aa, Artificial Sequence
  Synthetic
MSAGSDQIEGSPHHESDNSIATKILNFGHTCWKLQRPYVVKGMISIACGLFGRELFHNTNLLSWSLMLKAFSSLMVILSFNFFAAAMNQIYDVEIDRINKPDLPLVSGEMSIETAWILSIIVALTGLILTIKLNCGPLFISLYCVSLFAGFAYSVPPIRWKQYPFTNFLITISSHVGVNFTCYYASRAAFGLPFEMSPPFTFILAFMTVMGMTIAFAKDISDIEGDAKYGVSTVATKLGARNMTFVVSGVLLLTYVSAILAAIIWPQAFKSNVMLLSHAILAFCLIFQTRELALANYASAPSRQFFEFIWKLHYAEYLVYVFI

SEQ ID NO: 796 - protein, 323 aa, Artificial Sequence
  Synthetic
MSAGSDQIEGSPHHESDNSIATKILNFGHTCWKLQRPYVVKGMISIACGLFGRELFHNTNLLSWSLMLKAFSSLMVILSFNFFAAAMNQIYDVEIDRINKPDLPLVSGEMSIETAWILSIIVALTGLILTIKLNCGPLFISLYCVSIFAGFAYSVPPIRWKQYPFTNFLITISSHVGVNFTCYYASRAAFGLPFEMSPPFTFILAFMTVMGMTIAFAKDISDIEGDAKYGVSTVATKLGARNMTFVVSGVLLLTYVSAILAAIIWPQAFKSNVMLLSHAILAFCLIFQTRELALANYASAPSRQFFEFIWKLHYAEYLVYVFI

SEQ ID NO: 797 - protein, 323 aa, Artificial Sequence
  Synthetic
MSAGSDQIEGSPHHESDNSIATKILNFGHTCWKLQRPYVVKGMISIACGLFGRELFHNTNLLSWSLMLKAFSSLMVILSFNFYAAAINQIYDVDIDRINKPDLPLVSGEMSIETAWILSIIVALTGLILTIKLNCGPLFISLYCVSIFAGTAYSVPPIRWKQYPFTNFLITISSHVGVNFTCYYASRAAFGLPFEMSPPFTFILAFMTVMGMTIAFAKDISDIEGDAKYGVSTVATKLGARNMTFVVSGVLLLTYVSAILAAIIWPQAFKSNVMLLSHAILAFCLIFQTRELALANYASAPSRQFFEFIWKLHYAEYLVYVFI

SEQ ID NO: 798 - protein, 323 aa, Artificial Sequence
  Synthetic
MSAGSDQIEGSPHHESDNSIATKILNFGHTCWKLQRPYVVKGMISIACGLFGRELFHNTNLLSWSLMLKAFSSLMVILSFNFFAAAVNQIYDVDIDRINKPDLPLVSGEMSIETAWILAIIVALTGLILTIKLNCGPLFISLYCVSIFAGGAYSVPPIRWKQYPFTNFLITISSHVGVNFTCYYASRAAFGLPFEMSPPFTFILAFMTVMGMTIAFAKDISDIEGDAKYGVSTVATKLGARNMTFVVSGVLLLTYVSAILAAIIWPQAFKSNVMLLSHAILAFCLIFQTRELALANYASAPSRQFFEFIWKLHYAEYLVYVFI

SEQ ID NO: 799 - protein, 323 aa, Artificial Sequence
  Synthetic
MSAGSDQIEGSPHHESDNSIATKILNFGHTCWKLQRPYVVKGMISIACGLFGRELFHNTNLLSWSLMLKAFSSLMVILSFNFFAAAMNQIYDVDIDRINKPDLPLVSGEMSIETAWILAIIVALTGLILTIKLNCGPLFISLYCVSIFAGFAYSVPPIRWKQYPFTNFLITISSHVGVNFTCYYASRAAFGLPFEMSPPFTFILAFMTVMGMTIAFAKDISDIEGDAKYGVSTVATKLGARNMTFVVSGVLLLTYVSAILAAIIWPQAFKSNVMLLSHAILAFCLIFQTRELALANYASAPSRQFFEFIWKLHYAEYLVYVFI

SEQ ID NO: 800 - protein, 323 aa, Artificial Sequence
  Synthetic
MSAGSDQIEGSPHHESDNSIATKILNFGHTCWKLQRPYVVKGLISIACGLFGRELFHNTNLLSWSLMLKAFSSLMVILSFNFFAASVNQIYDVDIDRINKPDLPLVSGEMSIETAWILSIIVALTGLILTIKLNCGPLFISLYCVSIFAGFAYSVPPIRWKQYPFTNFLITISSHVGVNFTCYYASRAAFGLPFEMSPPFTFILAFMTVMGMTIAFAKDISDIEGDAKYGVSTVATKLGARNMTFVVSGVLLLTYVSAILAAIIWPQAFKSNVMLLSHAILAFCLIFQTRELALANYASAPSRQFFEFIWKLHYAEYLVYVFI

SEQ ID NO: 801 - protein, 323 aa, Artificial Sequence
  Synthetic
MSAGSDQIEGSPHHESDNSIATKILNFGHTCWKLQRPYVVKGMISIACGLFGRELFHNTNLLSWSLMLKAFSSLMVILSFNFFAATMNQIYDVDIDRINKPDLPLVSGEMSIETAWILAIIVALTGLILTIKLNCGPLFISLYCVSIFAGTAYSVPPIRWKQYPFTNFLITISSHVGVNFTCYYASRAAFGLPFEMSPPFTFILAFMTVMGMTIAFAKDISDIEGDAKYGVSTVATKLGARNMTFVVSGVLLLTYVSAILAAIIWPQAFKSNVMLLSHAILAFCLIFQTRELALANYASAPSRQFFEFIWKLHYAEYLVYVFI

SEQ ID NO: 802 - protein, 323 aa, Artificial Sequence
  Synthetic
MSAGSDQIEGSPHHESDNSIATKILNFGHTFWKLQRPYVVKGMISIACGLFGRELFHNTNLLSWSLMLKAFSSLMVILSFNGFAAIMNQIYDVDIDRINKPDLPLVSGEMSIETAWILSIIVALTGLILTIKLNCGPLFISLYCVSIFAGFAYSVPPIRWKQYPFTNFLITISSHVGVNFTCYYASRAAFGLPFEMSPPFTFILAFMTVMGMTIAFAKDISDIEGDAKYGVSTVATKLGARNMTFVVSGVLLLTYVSAILAAIIWPQAFKSNVMLLSHAILAFCLIFQTRELALANYASAPSRQFFEFIWKLHYAEYLVYVFI

SEQ ID NO: 803 - protein, 323 aa, Artificial Sequence
  Synthetic
MSAGSDQIEGSPHHESDNSIATKILNFGHTFWKLQRPYVVKGLISIACGLFGRELFHNTNLLSWSLMLKAFSSLMVILSFNFFAAAMNQIYDVEIDRINKPDLPLVSGEMSIETAWILSIIVALTGLILTIKLNCGPLFISLYCVSIFAGFAYSVPPIRWKQYPFTNFLITISSHVGVNFTCYYASRAAFGLPFEMSPPFTFILAFMTVMGMTIAFAKDISDIEGDAKYGVSTVATKLGARNMTFVVSGVLLLTYVSAILAAIIWPQAFKSNVMLLSHAILAFCLIFQTRELALANYASAPSRQFFEFIWKLHYAEYLVYVFI

SEQ ID NO: 804 - protein, 323 aa, Artificial Sequence
  Synthetic
MSAGSDQIEGSPHHESDNSIATKILNFGHTFWKLQRPYVVKGMISIACGLFGRELFHNTNLLSWSLMLKAFSSLMVILSFNFFAAVMNQIYDVEIDRINKPDLPLVSGEMSIETAWILSIIVALTGLILTIKLNCGPLFISLYCVSIFAGFAYSVPPIRWKQYPFTNFLITISSHVGVNFTCYYASRAAFGLPFEMSPPFTFILAFMTVMGMTIAFAKDISDIEGDAKYGVSTVATKLGARNMTFVVSGVLLLTYVSAILAAIIWPQAFKSNVMLLSHAILAFCLIFQTRELALANYASAPSRQFFEFIWKLHYAEYLVYVFI

SEQ ID NO: 805 - protein, 323 aa, Artificial Sequence
  Synthetic
MSAGSDQIEGSPHHESDNSIATKILNFGHTCWKLQRPYVVKGMISIACGLFGRELFHNTNLLSWSLMLKAFSSLMVILSFNFFAAGMNQIYDVDIDRINKPDLPLVSGEMSIETAWILSIIVALTGLILTIKLNCGPLFISLYCVSIFAGFAYSVPPIRWKQYPFTNFLITISSHVGVNFTCYYASRAAFGLPFEMSPPFTFILAFMTVMGMTIAFAKDISDIEGDAKYGVSTVATKLGARNMTRVVSGVLLLTYVSAILAAIIWPQAFKSNVMLLSHAILAFCLIFQTRELALANYASAPSRQFFEFIWKLHYAEYLVYVFI

SEQ ID NO: 806 - protein, 323 aa, Artificial Sequence
  Synthetic
MSAGSDQIEGSPHHESDNSIATKILNFGHTCWKLQRPYVVKGLISIACGLFGRELFHNTNLLSWSLMLKAFSSLMVILSFNFFAASMNQIYDVDIDRINKPDLPLVSGEMSIETAWILSIIVALTGLILTIKLNCGPLFISLYCVSIFAGFAYSVPPIRWKQYPFTNFLITISSHVGVNFTCYYASRAAFGLPFEMSPPFTFILAFMTVMGMTIAFAKDISDIEGDAKYGVSTVATKLGARNMTRVVSGVLLLTYVSAILAAIIWPQAFKSNVMLLSHAILAFCLIFQTRELALANYASAPSRQFFEFIWKLHYAEYLVYVFI

SEQ ID NO: 807 - protein, 323 aa, Artificial Sequence
  Synthetic
MSAGSDQIEGSPHHESDNSIATKILNFGHTCWKLQRPYVVKGMISIACGLFGRELFHNTNLLSWSLMLKAFSSLMVILSFNFFAATTNQIYDVDIDRINKPDLPLVSGEMSIETAWILSIIVALTGLILTIKLNCGPLFISLYCVSIFAGFAYSVPPIRWKQYPFTNFLITISSHVGVNFTCYYASRAAFGLPFEMSPPFTFILAFMTVMGMTIAFAKDISDIEGDAKYGVSTVATKLGARNMTFVVSGVLLLTYVSAILAAIIWPQAFKSNVMLLSHAILAFCLIFQTRELALANYASAPSRQFFEFIWKLHYAEYLVYVFI

SEQ ID NO: 808 - protein, 323 aa, Artificial Sequence
  Synthetic
MSAGSDQIEGSPHHESDNSIATKILNFGHTFWKLQRPYVVKGLISIACGLFGKELLHNTNLISWSLMFKAFFALVPILSFNFFAAAMNQIYDVEIDRINKPDLPLVSGEMSIRTAWILSIIVALTGLIVTIKMKGGPLFVFIYIFGLFAGFAYSVPPIRWKQYPFTNFLITISSHVGLAFTSYYASRAALGLPFELRPSFSFIIAFMTVMGMTIAFAKDISDIEGDAKYGVSTVATKLGARNMTRVVSGVLLLNYLVSILAGIIWPFAFNSNVMILSHAILAFCLIFRTRELALANYASAPSRQFFEFIWLLYYAEYLVYVFI

SEQ ID NO: 809 - protein, 323 aa, Artificial Sequence
  Synthetic
MSAGSDQIEGSPHHESDNSIATKILNFGHTFWKLQRPYVVKGLISIACGLFGKELLHNTNLISWSLMFKAFFALVPILSFNFFAAVVNQIYDVEIDRINKPDLPLVSGEMSIETAWILSIIVALTGLIVTIKMKGGPLFVFIYILGLFAGFAYSVPPIRWKQYPFTNFLITISSHVGLAFTSYYASRAALGLPFELRPSFSFIIAFMTVMGMTIAFAKDISDIEGDAKYGVSTVATKLGARNMTRVVSGVLLLNYLVSILAGIIWPQAFNSNVMILSHAILAFCLIFQTRELALANYASAPSRQFFEFIWNLYYAEYLVYVFI

SEQ ID NO: 810 - protein, 323 aa, Artificial Sequence
  Synthetic
MSAGSDQIEGSPHHESDNSIATKILNFGHTFWKLQRPYVVKGLISIACGLFGKELLHNTNLISWSLMFKAFFALVPILSFNFFAASVNQIYDVEIDRINKPDLPLVSGEMSIETAWILSIIVALTGLIVTIKMKGGPLFVFIYILGLFAGFAYSVPPIRWKQYPFTNFLITISSHVGLAFTSYYASRAALGLPFELRPSFSFIIAFMTVMGMTIAFAKDISDIEGDAKYGVSTVATKLGARNMTRVVSGVLLLNYLVSILAGIIWPQAFNSNVMILSHAILAFCLIFQTRELALANYASAPSRQFFEFIWKLYYAEYLVYVFI

SEQ ID NO: 811 - protein, 323 aa, Artificial Sequence
  Synthetic
MSAGSDQIEGSPHHESDNSIATKILNFGHTFWKLQRPYVVKGMISCACGLFGKELLHNTNLISWSLMFKAFFALVPILSFNGFAAIMNQIYDVEIDRINKPDLPLVSGEMSIRTAWILSIIVALTGLIVTIKMKGGPLFVFIYILGIFAGFAYSVPPIRWKQYPFTNFLITISSHVGLAFTSYYASRAALGLPFELRPSFSFIIAFMTVMGMTIAFAKDISDIEGDAKYGVSTVATKLGARNMTFVVSGVLLLNYLVSILAGIIWPFAFNSNVMILSHAILAFCLIFRTRELALANYASAPSRQFFEFIWNLYYAEYLVYVFI

SEQ ID NO: 812 - protein, 323 aa, Artificial Sequence
  Synthetic
MSAGSDQIEGSPHHESDNSIATKILNFGHTCWKLQRPYVVKGMISIACGLFGRELFHNTNLLSWSLMLKAFSSLMVILSFNFFAAGMNQIYDVEIDRINKPDLPLVSGEMSIETAWILSIIVALTGLILTIKLNCGPLFISLYCVSIFAGFAYSVPPIRWKQYPFTNFLITISSHVGVNFTCYYASRAAFGLPFEMSPPFTFILAFMTVMGMTIAFAKDISDIEGDAKYGVSTVATKLGARNMTFVVSGVLLLTYVSAILAAIIWPQAFKSNVMLLSHAILAFCLIFQTRELALANYASAPSRQFFEFIWKLHYAEYLVYVFI

SEQ ID NO: 813 - protein, 323 aa, Artificial Sequence
  Synthetic
MSAGSDQIEGSPHHESDNSIATKILNFGHTCWKLQRPYVVKGMISIACGLFGRELFHNTNLLSWSLMLKAFSSLMVILSFNGFAAIMNQIYDVDIDRINKPDLPLVSGEMSIETAWILSIIFALTGLILTIKLNCGPLFISLYCVSIFAGFAYSVPPIRWKQYPFTNFLITISSHVGVNFTCYYASRAAFGLPFEMSPPFTFILAFMTVMGMTIAFAKDISDIEGDAKYGVSTVATKLGARNMTFVVSGVLLLTYVSAILAAIIWPQAFKSNVMLLSHAILAFCLIFQTRELALANYASAPSRQFFEFIWKLHYAEYLVYVFI

SEQ ID NO: 814 - protein, 323 aa, Artificial Sequence
  Synthetic
MSAGSDQIEGSPHHESDNSIATKILNFGHTFWKLQRPYVVKGLISIACGLFGKELLHNTNLISWSLMFKAFFALVPILSFNGFAAIMNQIYDVDIDRINKPDLPLVSGEMSIRTAWILSIIVALTGLIVTIKMKGGPLFVFIYISGIFAGFAYSVPPIRWKQYPFTNFLITISSHVGLAFTSYYASRAALGLPFELRPSFSFIIAFMTVMGMTIAFAKDISDIEGDAKYGVSTVATKLGARNMTRVVSGVLLLNYLVSILAGIIWPFAFNSNVMILSHAILAFCLIFRTRELALANYASAPSRQFFEFIWRLYYAEYLVYVFI

SEQ ID NO: 815 - protein, 323 aa, Artificial Sequence
  Synthetic
MSAGSDQIEGSPHHESDNSIATKILNFGHTFWKLQRPYVVKGLISIACGLFGKELLHNTNLISWSLMFKAFFALVPILSFNFFAASMNQIYDVEIDRINKPDLPLVSGEMSIRTAWILSIIVALTGLIVTIKMKGGPLFVFIYIFGIFAGFAYSVPPIRWKQYPFTNFLITISSHVGLAFTSYYASRAALGLPFELRPSFSFIIAFMTVMGMTIAFAKDISDIEGDAKYGVSTVATKLGARNMTRVVSGVLLLNYLVSILAGIIWPFAFNSNVMILSHAILAFCLIFRTRELALANYASAPSRQFFEFIWKLYYAEYLVYVFI

SEQ ID NO: 816 - protein, 323 aa, Artificial Sequence
  Synthetic
MSAGSDQIEGSPHHESDNSIATKILNFGHTFWKLQRPYVVKGVISIACGLFGKELLHNTNLISWSLMFKAFFALVPILSFNFFAAIVNQIYDVEIDRINKPDLPLVSGEMSIRTAWILSIIVALTGLIVTIKMKGGPLFVFIYITGIFAGFAYSVPPIRWKQYPFTNFLITISSHVGLAFTSYYASRAALGLPFELRPSFSFIIAFMTVMGMTIAFAKDISDIEGDAKYGVSTVATKLGARNMTRVVSGVLLLNYLVSILAGIIWPFAFNSNVMILSHAILAFCLIFQTRELALANYASAPSRQFFEFIWNLYYAEYLVYVFI

SEQ ID NO: 817 - protein, 323 aa, Artificial Sequence
  Synthetic
MSAGSDQIEGSPHHESDNSIATKILNFGHTFWKLQRPYVVKGMISIACGLFGKELLHNTNLISWSLMFKAFFALVPILSFNGFAAVVNQIYDVEIDRINKPDLPLVSGEMSIETAWILSIIVALTGLIVTIKMKGGPLFVFIYILGLFAGFAYSVPPIRWKQYPFTNFLITISSHVGLAFTSYYASRAALGLPFELRPSFSFIIAFMTVMGMTIAFAKDISDIEGDAKYGVSTVATKLGARNMTRVVSGVLLLNYLVSILAGIIWPQAFNSNVMILSHAILAFCLIFQTRELALANYASAPSRQFFEFIWNLYYAEYLVYVFI

SEQ ID NO: 818 - protein, 323 aa, Artificial Sequence
  Synthetic
MSAGSDQIEGSPHHESDNSIATKILNFGHTFWKLQRPYVVKGMISIACGLFGRELFHNTNLLSWSLMLKAFSSLMVILSFNFFAAAMNQIYDVEIDRINKPDLPLVSGEMSIETAWILSIIVALTGLILTIKLNCGPLFISLYCVSIFAGFAYSVPPIRWKQYPFTNFLITISSHVGVNFTCYYASRAAFGLPFEMSPPFTFILAFMTVMGMTIAFAKDISDIEGDAKYGVSTVATKLGARNMTRVVSGVLLLTYVSAILAAIIWPQAFKSNVMLLSHAILAFCLIFQTRELALANYASAPSRQFFEFIWKLHYAEYLVYVFI

SEQ ID NO: 819 - protein, 323 aa, Artificial Sequence
  Synthetic
MSAGSDQIEGSPHHESDNSIATKILNFGHTCWKLQRPYVVKGMISCACGLFGKELLHNTNLISWSLMFKAFFALVPILSFNGFAAIMNQIYDVEIDRINKPDLPLVSGEMSIRTAWILSIIVALTGLIVTIKMKGGPLFVFIYIFGLFAGFAYSVPPIRWKQYPFTNFLITISSHVGLAFTSYYASRAALGLPFELRPSFSFIIAFMTVMGMTIAFAKDISDIEGDAKYGVSTVATKLGARNMTRVVSGVLLLNYLVSILAGIIWPFAFNSNVMILSHAILAFCLIFRTRELALANYASAPSRQFFEFIWNLYYAEYLVYVFI

SEQ ID NO: 820 - protein, 323 aa, Artificial Sequence
  Synthetic
MSAGSDQIEGSPHHESDNSIATKILNFGHTFWKLQRPYVVKGLISIACGLFGKELLHNTNLISWSLMFKAFFALVPILSFNFFAAGVNQIYDVEIDRINKPDLPLVSGEMSIETAWILSIIVALTGLIVTIKMKGGPLFVFIYILGLFAGFAYSVPPIRWKQYPFTNFLITISSHVGLAFTSYYASRAALGLPFELRPSFSFIIAFMTVMGMTIAFAKDISDIEGDAKYGVSTVATKLGARNMTRVVSGVLLLNYLVSILAGIIWPQAFNSNVMILSHAILAFCLIFQTRELALANYASAPSRQFFEFIWNLYYAEYLVYVFI

SEQ ID NO: 821 - protein, 323 aa, Artificial Sequence
  Synthetic
MSAGSDQIEGSPHHESDNSIATKILNFGHTCWKLQRPYVVKGLISIACGLFGKELLHNTNLISWSLMFKAFFALVPILSFNFFAAAMNQIYDVEIDRINKPDLPLVSGEMSIRTAWILSIIVALTGLIVTIKMKGGPLFVFIYIFGLFAGFAYSVPPIRWKQYPFTNFLITISSHVGLAFTSYYASRAALGLPFELRPSFSFIIAFMTVMGMTIAFAKDISDIEGDAKYGVSTVATKLGARNMTRVVSGVLLLNYLVSILAGIIWPFAFNSNVMILSHAILAFCLIFRTRELALANYASAPSRQFFEFIWNLYYAEYLVYVFI

SEQ ID NO: 822 - protein, 323 aa, Artificial Sequence
  Synthetic
MSAGSDQIEGSPHHESDNSIATKILNFGHTCWKLQRPYVVKGLISIACGLFGRELFHNTNLLSWSLMLKAFSSLMVILSFNFFAASMNQIYDVDIDRINKPDLPLVSGEMSIETAWILSIIVALTGLILTIKLNCGPLFISLYCVSIFAGFAYSVPPIRWKQYPFTNFLITISSHVGVNFTCYYASRAAFGLPFEMSPPFTFILAFMTVMGMTIAFAKDISDIEGDAKYGVSTVATKLGARNMTFVVSGVLLLTYVSAILAAIIWPQAFKSNVMLLSHAILAFCLIFQTRELALANYASAPSRQFFEFIWKLHYAEYLVYVFI

SEQ ID NO: 823 - protein, 323 aa, Artificial Sequence
  Synthetic
MSAGSDQIEGSPHHESDNSIATKILNFGHTCWKLQRPYVVKGLISIACGLFGKELLHNTNLISWSLMFKAFFALVPILSFNGFAAVVNQIYDVEIDRINKPDLPLVSGEMSIETAWILSIIVALTGLIVTIKMKGGPLFVFIYILGLFAGFAYSVPPIRWKQYPFTNFLITISSHVGLAFTSYYASRAALGLPFELRPSFSFIIAFMTVMGMTIAFAKDISDIEGDAKYGVSTVATKLGARNMTRVVSGVLLLNYLVSILAGIIWPQAFNSNVMILSHAILAFCLIFQTRELALANYASAPSRQFFEFIWNLYYAEYLVYVFI

SEQ ID NO: 824 - protein, 323 aa, Artificial Sequence
  Synthetic
MSAGSDQIEGSPHHESDNSIATKILNFGHTFWKLQRPYVVKGMISIACGLFGRELFHNTNLLSWSLMLKAFSSLMVILSFNFFAAVVNQIYDVDIDRINKPDLPLVSGEMSIETAWILSIIVALTGLILTIKLNCGPLFISLYCVSIFAGFAYSVPPIRWKQYPFTNFLITISSHVGVNFTCYYASRAAFGLPFEMSPPFTFILAFMTVMGMTIAFAKDISDIEGDAKYGVSTVATKLGARNMTFVVSGVLLLTYVSAILAAIIWPQAFKSNVMLLSHAILAFCLIFQTRELALANYASAPSRQFFEFIWKLHYAEYLVYVFI

SEQ ID NO: 825 - protein, 323 aa, Artificial Sequence
  Synthetic
MSAGSDQIEGSPHHESDNSIATKILNFGHTCWKLQRPYVVKGMISIACGLFGRELFHNTNLLSWSLMLKAFSSLMVILSFNFFAAGMNQIYDVDIDRINKPDLPLVSGEMSIETAWILSIISALTGLILTIKLNCGPLFISLYCVSIFAGFAYSVPPIRWKQYPFTNFLITISSHVGVNFTCYYASRAAFGLPFEMSPPFTFILAFMTVMGMTIAFAKDISDIEGDAKYGVSTVATKLGARNMTFVVSGVLLLTYVSAILAAIIWPQAFKSNVMLLSHAILAFCLIFQTRELALANYASAPSRQFFEFIWKLHYAEYLVYVFI

SEQ ID NO: 826 - protein, 323 aa, Artificial Sequence
  Synthetic
MSAGSDQIEGSPHHESDNSIATKILNFGHTFWKLQRPYVVKGVISIACGLFGKELLHNTNLISWSLMFKAFFALVPILSFNGFAAIMNQIYDVEIDRINKPDLPLVSGEMSIRTAWILSIIVALTGLIVTIKMKGGPLFVFIYISGIFAGFAYSVPPIRWKQYPFTNFLITISSHVGLAFTSYYASRAALGLPFELRPSFSFIIAFMTVMGMTIAFAKDISDIEGDAKYGVSTVATKLGARNMTRVVSGVLLLNYLVSILAGIIWPQAFNSNVMILSHAILAFCLIFRTRELALANYASAPSRQFFEFIWRLYYAEYLVYVFI

SEQ ID NO: 827 - protein, 323 aa, Artificial Sequence
  Synthetic
MSAGSDQIEGSPHHESDNSIATKILNFGHTFWKLQRPYVVKGLISIACGLFGKELLHNTNLISWSLMFKAFFALVPILSFNGFAAIMNQIYDVEIDRINKPDLPLVSGEMSIRTAWILSIIVALTGLIVTIKMKGGPLFVFIYITGIFAGFAYSVPPIRWKQYPFTNFLITISSHVGLAFTSYYASRAALGLPFELRPSFSFIIAFMTVMGMTIAFAKDISDIEGDAKYGVSTVATKLGARNMTRVVSGVLLLNYLVSILAGIIWPFAFNSNVMILSHAILAFCLIFQTRELALANYASAPSRQFFEFIWNLYYAEYLVYVFI

SEQ ID NO: 828 - protein, 323 aa, Artificial Sequence
  Synthetic
MSAGSDQIEGSPHHESDNSIATKILNFGHTCWKLQRPYVVKGMISIACGLFGRELFHNTNLLSWSLMLKAFSSLMVILSFNFYAATVNQIYDVDIDRINKPDLPLVSGEMSIETAWILSIIVALTGLILTIKLNCGPLFISLYCVSIFAGFAYSVPPIRWKQYPFTNFLITISSHVGVNFTCYYASRAAFGLPFEMSPPFTFILAFMTVMGMTIAFAKDISDIEGDAKYGVSTVATKLGARNMTFVVSGVLLLTYVSAILAAIIWPQAFKSNVMLLSHAILAFCLIFQTRELALANYASAPSRQFFEFIWKLHYAEYLVYVFI

SEQ ID NO: 829 - protein, 323 aa, Artificial Sequence
  Synthetic
MSAGSDQIEGSPHHESDNSIATKILNFGHTCWKLQRPYVVKGMISIACGLFGRELFHNTNLLSWSLMLKAFSSLMVILSFNFFAAGINQIYDVDIDRINKPDLPLVSGEMSIETAWILSIIVALTGLILTIKLNCGPLFISLYCVSIFAGFAYSVPPIRWKQYPFTNFLITISSHVGVNFTCYYASRAAFGLPFEMSPPFTFILAFMTVMGMTIAFAKDISDIEGDAKYGVSTVATKLGARNMTFVVSGVLLLTYVSAILAAIIWPQAFKSNVMLLSHAILAFCLIFQTRELALANYASAPSRQFFEFIWKLHYAEYLVYVFI

SEQ ID NO: 830 - protein, 323 aa, Artificial Sequence
  Synthetic
MSAGSDQIEGSPHHESDNSIATKILNFGHTFWKLQRPYVVKGMISIACGLFGRELFHNTNLLSWSLMLKAFSSLMVILSFNGFAAIMNQIYDVEIDRINKPDLPLVSGEMSIETAWILSIIVALTGLILTIKLNCGPLFISLYCVSLFAGFAYSVPPIRWKQYPFTNFLITISSHVGVNFTCYYASRAAFGLPFEMSPPFTFILAFMTVMGMTIAFAKDISDIEGDAKYGVSTVATKLGARNMTFVVSGVLLLTYVSAILAAIIWPQAFKSNVMLLSHAILAFCLIFQTRELALANYASAPSRQFFEFIWKLHYAEYLVYVFI

SEQ ID NO: 831 - protein, 323 aa, Artificial Sequence
  Synthetic
MSAGSDQIEGSPHHESDNSIATKILNFGHTCWKLQRPYVVKGMISIACGLFGRELFHNTNLLSWSLMLKAFSSLMVILSFNFYAASINQIYDVDIDRINKPDLPLVSGEMSIETAWILSIIVALTGLILTIKLNCGPLFISLYCVSIFAGTAYSVPPIRWKQYPFTNFLITISSHVGVNFTCYYASRAAFGLPFEMSPPFTFILAFMTVMGMTIAFAKDISDIEGDAKYGVSTVATKLGARNMTFVVSGVLLLTYVSAILAAIIWPQAFKSNVMLLSHAILAFCLIFQTRELALANYASAPSRQFFEFIWKLHYAEYLVYVFI

SEQ ID NO: 832 - protein, 323 aa, Artificial Sequence
  Synthetic
MSAGSDQIEGSPHHESDNSIATKILNFGHTCWKLQRPYVVKGMISIACGLFGRELFHNTNLLSWSLMLKAFSSLMVILSFNFFAAAMNQIYDVDIDRINKPDLPLVSGEMSIETAWILSIISALTGLILTIKLNCGPLFISLYCVSIFAGFAYSVPPIRWKQYPFTNFLITISSHVGVNFTCYYASRAAFGLPFEMSPPFTFILAFMTVMGMTIAFAKDISDIEGDAKYGVSTVATKLGARNMTFVVSGVLLLTYVSAILAAIIWPQAFKSNVMLLSHAILAFCLIFQTRELALANYASAPSRQFFEFIWKLHYAEYLVYVFI

SEQ ID NO: 833 - protein, 323 aa, Artificial Sequence
  Synthetic
MSAGSDQIEGSPHHESDNSIATKILNFGHTCWKLQRPYVVKGMISIACGLFGRELFHNTNLLSWSLMLKAFSSLMVILSFNFFAATMNQIYDVDIDRINKPDLPLVSGEMSIETAWILAIIVALTGLILTIKLNCGPLFISLYCVSIFAGFAYSVPPIRWKQYPFTNFLITISSHVGVNFTCYYASRAAFGLPFEMSPPFTFILAFMTVMGMTIAFAKDISDIEGDAKYGVSTVATKLGARNMTFVVSGVLLLTYVSAILAAIIWPQAFKSNVMLLSHAILAFCLIFQTRELALANYASAPSRQFFEFIWKLHYAEYLVYVFI

SEQ ID NO: 834 - protein, 323 aa, Artificial Sequence
  Synthetic
MSAGSDQIEGSPHHESDNSIATKILNFGHTFWKLQRPYVVKGMISCACGLFGKELLHNTNLISWSLMFKAFFALVPILSFNFFAAAMNQIYDVEIDRINKPDLPLVSGEMSIRTAWILSIIVALTGLIVTIKMKGGPLFVFIYIFGLFAGFAYSVPPIRWKQYPFTNFLITISSHVGLAFTSYYASRAALGLPFELRPSFSFIIAFMTVMGMTIAFAKDISDIEGDAKYGVSTVATKLGARNMTFVVSGVLLLNYLVSILAGIIWPFAFNSNVMILSHAILAFCLIFRTRELALANYASAPSRQFFEFIWNLYYAEYLVYVFI

SEQ ID NO: 835 - protein, 323 aa, Artificial Sequence
  Synthetic
MSAGSDQIEGSPHHESDNSIATKILNFGHTFWKLQRPYVVKGMISCACGLFGKELLHNTNLISWSLMFKAFFALVPILSFNFFAASMNQIYDVEIDRINKPDLPLVSGEMSIRTAWILSIIVALTGLIVTIKMKGGPLFVFIYIFGLFAGFAYSVPPIRWKQYPFTNFLITISSHVGLAFTSYYASRAALGLPFELRPSFSFIIAFMTVMGMTIAFAKDISDIEGDAKYGVSTVATKLGARNMTRVVSGVLLLNYLVSILAGIIWPQAFNSNVMILSHAILAFCLIFRTRELALANYASAPSRQFFEFIWRLYYAEYLVYVFI

SEQ ID NO: 836 - protein, 323 aa, Artificial Sequence
  Synthetic
MSAGSDQIEGSPHHESDNSIATKILNFGHTFWKLQRPYVVKGMISCACGLFGKELLHNTNLISWSLMFKAFFALVPILSFNFFAAIVNQIYDVEIDRINKPDLPLVSGEMSIRTAWILSIIVALTGLIVTIKMKGGPLFVFIYITGIFAGFAYSVPPIRWKQYPFTNFLITISSHVGLAFTSYYASRAALGLPFELRPSFSFIIAFMTVMGMTIAFAKDISDIEGDAKYGVSTVATKLGARNMTRVVSGVLLLNYLVSILAGIIWPQAFNSNVMILSHAILAFCLIFRTRELALANYASAPSRQFFEFIWRLYYAEYLVYVFI

SEQ ID NO: 837 - protein, 323 aa, Artificial Sequence
  Synthetic
MSAGSDQIEGSPHHESDNSIATKILNFGHTFWKLQRPYVVKGMISIACGLFGKELLHNTNLISWSLMFKAFFALVPILSFNGFAAVVNQIYDVEIDRINKPDLPLVSGEMSIETAWILSIIVALTGLIVTIKMKGGPLFVFIYILGLFAGFAYSVPPIRWKQYPFTNFLITISSHVGLAFTSYYASRAALGLPFELRPSFSFIIAFMTVMGMTIAFAKDISDIEGDAKYGVSTVATKLGARNMTRVVSGVLLLNYLVSILAGIIWPQAFNSNVMILSHAILAFCLIFQTRELALANYASAPSRQFFEFIWRLYYAEYLVYVFI

SEQ ID NO: 838 - protein, 323 aa, Artificial Sequence
  Synthetic
MSAGSDQIEGSPHHESDNSIATKILNFGHTCWKLQRPYVVKGLISIACGLFGRELFHNTNLLSWSLMLKAFSSLMVILSFNFFAAIMNQIYDVDIDRINKPDLPLVSGEMSIETAWILSIIVALTGLILTIKLNCGPLFISLYCVSLFAGFAYSVPPIRWKQYPFTNFLITISSHVGVNFTCYYASRAAFGLPFEMSPPFTFILAFMTVMGMTIAFAKDISDIEGDAKYGVSTVATKLGARNMTRVVSGVLLLTYVSAILAAIIWPQAFKSNVMLLSHAILAFCLIFQTRELALANYASAPSRQFFEFIWKLHYAEYLVYVFI

SEQ ID NO: 839 - protein, 323 aa, Artificial Sequence
  Synthetic
MSAGSDQIEGSPHHESDNSIATKILNFGHTCWKLQRPYVVKGMISIACGLFGRELFHNTNLLSWSLMLKAFSSLMVILSFNFYAAATNQIYDVDIDRINKPDLPLVSGEMSIETAWILSIIVALTGLILTIKLNCGPLFISLYCVSIFAGTAYSVPPIRWKQYPFTNFLITISSHVGVNFTCYYASRAAFGLPFEMSPPFTFILAFMTVMGMTIAFAKDISDIEGDAKYGVSTVATKLGARNMTFVVSGVLLLTYVSAILAAIIWPQAFKSNVMLLSHAILAFCLIFQTRELALANYASAPSRQFFEFIWKLHYAEYLVYVFI

SEQ ID NO: 840 - protein, 323 aa, Artificial Sequence
  Synthetic
MSAGSDQIEGSPHHESDNSIATKILNFGHTCWKLQRPYVVKGMISIACGLFGRELFHNTNLLSWSLMLKAFSSLMVILSFNFFAAAVNQIYDVDIDRINKPDLPLVSGEMSIETAWILSIIVALTGLILTIKLNCGPLFISLYCVSLFAGFAYSVPPIRWKQYPFTNFLITISSHVGVNFTCYYASRAAFGLPFEMSPPFTFILAFMTVMGMTIAFAKDISDIEGDAKYGVSTVATKLGARNMTFVVSGVLLLTYVSAILAAIIWPQAFKSNVMLLSHAILAFCLIFQTRELALANYASAPSRQFFEFIWKLHYAEYLVYVFI

SEQ ID NO: 841 - protein, 323 aa, Artificial Sequence
  Synthetic
MSAGSDQIEGSPHHESDNSIATKILNFGHTCWKLQRPYVVKGMISIACGLFGRELFHNTNLLSWSLMLKAFSSLMVILSFNFFAAVTNQIYDVDIDRINKPDLPLVSGEMSIETAWILAIIVALTGLILTIKLNCGPLFISLYCVSIFAGFAYSVPPIRWKQYPFTNFLITISSHVGVNFTCYYASRAAFGLPFEMSPPFTFILAFMTVMGMTIAFAKDISDIEGDAKYGVSTVATKLGARNMTFVVSGVLLLTYVSAILAAIIWPQAFKSNVMLLSHAILAFCLIFQTRELALANYASAPSRQFFEFIWKLHYAEYLVYVFI

SEQ ID NO: 842 - protein, 323 aa, Artificial Sequence
  Synthetic
MSAGSDQIEGSPHHESDNSIATKILNFGHTCWKLQRPYVVKGMISIACGLFGRELFHNTNLLSWSLMLKAFSSLMVILSFNFYAAGMNQIYDVDIDRINKPDLPLVSGEMSIETAWILSIIVALTGLILTIKLNCGPLFISLYCVSIFAGTAYSVPPIRWKQYPFTNFLITISSHVGVNFTCYYASRAAFGLPFEMSPPFTFILAFMTVMGMTIAFAKDISDIEGDAKYGVSTVATKLGARNMTFVVSGVLLLTYVSAILAAIIWPQAFKSNVMLLSHAILAFCLIFQTRELALANYASAPSRQFFEFIWKLHYAEYLVYVFI

SEQ ID NO: 843 - protein, 323 aa, Artificial Sequence
  Synthetic
MSAGSDQIEGSPHHESDNSIATKILNFGHTFWKLQRPYVVKGMISIACGLFGRELFHNTNLLSWSLMLKAFSSLMVILSFNFFAAVMNQIYDVEIDRINKPDLPLVSGEMSIETAWILSIIVALTGLILTIKLNCGPLFISLYCVSIFAGFAYSVPPIRWKQYPFTNFLITISSHVGVNFTCYYASRAAFGLPFEMSPPFTFILAFMTVMGMTIAFAKDISDIEGDAKYGVSTVATKLGARNMTRVVSGVLLLTYVSAILAAIIWPQAFKSNVMLLSHAILAFCLIFQTRELALANYASAPSRQFFEFIWKLHYAEYLVYVFI

SEQ ID NO: 844 - protein, 323 aa, Artificial Sequence
  Synthetic
MSAGSDQIEGSPHHESDNSIATKILNFGHTCWKLQRPYVVKGMISIACGLFGRELFHNTNLLSWSLMLKAFSSLMVILSFNGFAAIMNQIYDVDIDRINKPDLPLVSGEMSIETAWILSIIVALTGLILTIKLNCGPLFISLYCVSIFAGFAYSVPPIRWKQYPFTNFLITISSHVGVNFTCYYASRAAFGLPFEMSPPFTFILAFMTVMGMTIAFAKDISDIEGDAKYGVSTVATKLGARNMTRVVSGVLLLTYVSAILAAIIWPQAFKSNVMLLSHAILAFCLIFQTRELALANYASAPSRQFFEFIWKLHYAEYLVYVFI

SEQ ID NO: 845 - protein, 323 aa, Artificial Sequence
  Synthetic
MSAGSDQIEGSPHHESDNSIATKILNFGHTFWKLQRPYVVKGLISIACGLFGKELLHNTNLISWSLMFKAFFALVPILSFNGFAAVMNQIYDVEIDRINKPDLPLVSGEMSIETAWILSIIVALTGLIVTIKMKGGPLFVFIYILGLFAGFAYSVPPIRWKQYPFTNFLITISSHVGLAFTSYYASRAALGLPFELRPSFSFIIAFMTVMGMTIAFAKDISDIEGDAKYGVSTVATKLGARNMTRVVSGVLLLNYLVSILAGIIWPQAFNSNVMILSHAILAFCLIFQTRELALANYASAPSRQFFEFIWNLYYAEYLVYVFI

SEQ ID NO: 846 - protein, 323 aa, Artificial Sequence
  Synthetic
MSAGSDQIEGSPHHESDNSIATKILNFGHTCWKLQRPYVVKGMISIACGLFGRELFHNTNLLSWSLMLKAFSSLMVILSFNGFAAIMNQIYDVEIDRINKPDLPLVSGEMSIETAWILSIIVALTGLILTIKLNCGPLFISLYCVSLFAGFAYSVPPIRWKQYPFTNFLITISSHVGVNFTCYYASRAAFGLPFEMSPPFTFILAFMTVMGMTIAFAKDISDIEGDAKYGVSTVATKLGARNMTFVVSGVLLLTYVSAILAAIIWPQAFKSNVMLLSHAILAFCLIFQTRELALANYASAPSRQFFEFIWKLHYAEYLVYVFI

SEQ ID NO: 847 - protein, 323 aa, Artificial Sequence
  Synthetic
MSAGSDQIEGSPHHESDNSIATKILNFGHTFWKLQRPYVVKGLISIACGLFGKELLHNTNLISWSLMFKAFFALVPILSFNFFAASVNQIYDVEIDRINKPDLPLVSGEMSIETAWILSIIVALTGLIVTIKMKGGPLFVFIYILGLFAGFAYSVPPIRWKQYPFTNFLITISSHVGLAFTSYYASRAALGLPFELRPSFSFIIAFMTVMGMTIAFAKDISDIEGDAKYGVSTVATKLGARNMTRVVSGVLLLNYLVSILAGIIWPQAFNSNVMILSHAILAFCLIFQTRELALANYASAPSRQFFEFIWRLYYAEYLVYVFI

SEQ ID NO: 848 - protein, 323 aa, Artificial Sequence
  Synthetic
MSAGSDQIEGSPHHESDNSIATKILNFGHTFWKLQRPYVVKGLISIACGLFGKELLHNTNLISWSLMFKAFFALVPILSFNFFAAGMNQIYDVEIDRINKPDLPLVSGEMSIRTAWILSIIVALTGLIVTIKMKGGPLFVFIYISGIFAGFAYSVPPIRWKQYPFTNFLITISSHVGLAFTSYYASRAALGLPFELRPSFSFIIAFMTVMGMTIAFAKDISDIEGDAKYGVSTVATKLGARNMTFVVSGVLLLNYLVSILAGIIWPFAFNSNVMILSHAILAFCLIFRTRELALANYASAPSRQFFEFIWNLYYAEYLVYVFI

SEQ ID NO: 849 - protein, 323 aa, Artificial Sequence
  Synthetic
MSAGSDQIEGSPHHESDNSIATKILNFGHTCWKLQRPYVVKGMISIACGLFGRELFHNTNLLSWSLMLKAFSSLMVILSFNFFAAGMNQIYDVEIDRINKPDLPLVSGEMSIETAWILSIIVALTGLILTIKLNCGPLFISLYCVSLFAGFAYSVPPIRWKQYPFTNFLITISSHVGVNFTCYYASRAAFGLPFEMSPPFTFILAFMTVMGMTIAFAKDISDIEGDAKYGVSTVATKLGARNMTRVVSGVLLLTYVSAILAAIIWPQAFKSNVMLLSHAILAFCLIFQTRELALANYASAPSRQFFEFIWKLHYAEYLVYVFI

SEQ ID NO: 850 - protein, 323 aa, Artificial Sequence
  Synthetic
MSAGSDQIEGSPHHESDNSIATKILNFGHTFWKLQRPYVVKGLISIACGLFGKELLHNTNLISWSLMFKAFFALVPILSFNFFAASVNQIYDVEIDRINKPDLPLVSGEMSIETAWILSIIVALTGLIVTIKMKGGPLFVFIYILGLFAGFAYSVPPIRWKQYPFTNFLITISSHVGLAFTSYYASRAALGLPFELRPSFSFIIAFMTVMGMTIAFAKDISDIEGDAKYGVSTVATKLGARNMTRVVSGVLLLNYLVSILAGIIWPQAFNSNVMILSHAILAFCLIFQTRELALANYASAPSRQFFEFIWNLYYAEYLVYVFI

SEQ ID NO: 851 - protein, 323 aa, Artificial Sequence
  Synthetic
MSAGSDQIEGSPHHESDNSIATKILNFGHTCWKLQRPYVVKGMISIACGLFGRELFHNTNLLSWSLMLKAFSSLMVILSFNFYAASVNQIYDVDIDRINKPDLPLVSGEMSIETAWILSIIVALTGLILTIKLNCGPLFISLYCVSIFAGTAYSVPPIRWKQYPFTNFLITISSHVGVNFTCYYASRAAFGLPFEMSPPFTFILAFMTVMGMTIAFAKDISDIEGDAKYGVSTVATKLGARNMTFVVSGVLLLTYVSAILAAIIWPQAFKSNVMLLSHAILAFCLIFQTRELALANYASAPSRQFFEFIWKLHYAEYLVYVFI

SEQ ID NO: 852 - protein, 323 aa, Artificial Sequence
  Synthetic
MSAGSDQIEGSPHHESDNSIATKILNFGHTCWKLQRPYVVKGMISIACGLFGRELFHNTNLLSWSLMLKAFSSLMVILSFNFFAAVINQIYDVDIDRINKPDLPLVSGEMSIETAWILAIIVALTGLILTIKLNCGPLFISLYCVSIFAGTAYSVPPIRWKQYPFTNFLITISSHVGVNFTCYYASRAAFGLPFEMSPPFTFILAFMTVMGMTIAFAKDISDIEGDAKYGVSTVATKLGARNMTFVVSGVLLLTYVSAILAAIIWPQAFKSNVMLLSHAILAFCLIFQTRELALANYASAPSRQFFEFIWKLHYAEYLVYVFI

SEQ ID NO: 853 - protein, 323 aa, Artificial Sequence
  Synthetic
MSAGSDQIEGSPHHESDNSIATKILNFGHTCWKLQRPYVVKGLISIACGLFGRELFHNTNLLSWSLMLKAFSSLMVILSFNFFAAGMNQIYDVEIDRINKPDLPLVSGEMSIETAWILSIIVALTGLILTIKLNCGPLFISLYCVSIFAGFAYSVPPIRWKQYPFTNFLITISSHVGVNFTCYYASRAAFGLPFEMSPPFTFILAFMTVMGMTIAFAKDISDIEGDAKYGVSTVATKLGARNMTRVVSGVLLLTYVSAILAAIIWPQAFKSNVMLLSHAILAFCLIFQTRELALANYASAPSRQFFEFIWKLHYAEYLVYVFI

SEQ ID NO: 854 - protein, 323 aa, Artificial Sequence
  Synthetic
MSAGSDQIEGSPHHESDNSIATKILNFGHTCWKLQRPYVVKGMISIACGLFGRELFHNTNLLSWSLMLKAFSSLMVILSFNGFAATMNQIYDVDIDRINKPDLPLVSGEMSIETAWILSIIFALTGLILTIKLNCGPLFISLYCVSIFAGFAYSVPPIRWKQYPFTNFLITISSHVGVNFTCYYASRAAFGLPFEMSPPFTFILAFMTVMGMTIAFAKDISDIEGDAKYGVSTVATKLGARNMTFVVSGVLLLTYVSAILAAIIWPQAFKSNVMLLSHAILAFCLIFQTRELALANYASAPSRQFFEFIWKLHYAEYLVYVFI

SEQ ID NO: 855 - protein, 323 aa, Artificial Sequence
  Synthetic
MSAGSDQIEGSPHHESDNSIATKILNFGHTFWKLQRPYVVKGMISIACGLFGKELLHNTNLISWSLMFKAFFALVPILSFNFFAAIVNQIYDVEIDRINKPDLPLVSGEMSIRTAWILSIIVALTGLIVTIKMKGGPLFVFIYITGIFAGFAYSVPPIRWKQYPFTNFLITISSHVGLAFTSYYASRAALGLPFELRPSFSFIIAFMTVMGMTIAFAKDISDIEGDAKYGVSTVATKLGARNMTWVVSGVLLLNYLVSILAGIIWPFAFNSNVMILSHAILAFCLIFRTRELALANYASAPSRQFFEFIWKLYYAEYLVYVFI

SEQ ID NO: 856 - protein, 323 aa, Artificial Sequence
  Synthetic
MSAGSDQIEGSPHHESDNSIATKILNFGHTFWKLQRPYVVKGVISIACGLFGKELLHNTNLISWSLMFKAFFALVPILSFNFFAAIMNQIYDVEIDRINKPDLPLVSGEMSIRTAWILSIIVALTGLIVTIKMKGGPLFVFIYIFGLFAGFAYSVPPIRWKQYPFTNFLITISSHVGLAFTSYYASRAALGLPFELRPSFSFIIAFMTVMGMTIAFAKDISDIEGDAKYGVSTVATKLGARNMTWVVSGVLLLNYLVSILAGIIWPFAFNSNVMILSHAILAFCLIFRTRELALANYASAPSRQFFEFIWRLYYAEYLVYVFI

SEQ ID NO: 857 - protein, 323 aa, Artificial Sequence
  Synthetic
MSAGSDQIEGSPHHESDNSIATKILNFGHTCWKLQRPYVVKGLISIACGLFGKELLHNTNLISWSLMFKAFFALVPILSFNGFAAIMNQIYDVEIDRINKPDLPLVSGEMSIRTAWILSIIVALTGLIVTIKMKGGPLFVFIYIFGLFAGFAYSVPPIRWKQYPFTNFLITISSHVGLAFTSYYASRAALGLPFELRPSFSFIIAFMTVMGMTIAFAKDISDIEGDAKYGVSTVATKLGARNMTRVVSGVLLLNYLVSILAGIIWPFAFNSNVMILSHAILAFCLIFRTRELALANYASAPSRQFFEFIWKLYYAEYLVYVFI

SEQ ID NO: 858 - protein, 323 aa, Artificial Sequence
  Synthetic
MSAGSDQIEGSPHHESDNSIATKILNFGHTFWKLQRPYVVKGLISIACGLFGRELFHNTNLLSWSLMLKAFSSLMVILSFNFFAASMNQIYDVEIDRINKPDLPLVSGEMSIETAWILSIIVALTGLILTIKLNCGPLFISLYCVSIFAGFAYSVPPIRWKQYPFTNFLITISSHVGVNFTCYYASRAAFGLPFEMSPPFTFILAFMTVMGMTIAFAKDISDIEGDAKYGVSTVATKLGARNMTFVVSGVLLLTYVSAILAAIIWPQAFKSNVMLLSHAILAFCLIFQTRELALANYASAPSRQFFEFIWKLHYAEYLVYVFI

SEQ ID NO: 859 - protein, 323 aa, Artificial Sequence
  Synthetic
MSAGSDQIEGSPHHESDNSIATKILNFGHTFWKLQRPYVVKGMISIACGLFGRELFHNTNLLSWSLMLKAFSSLMVILSFNGFAAIMNQIYDVDIDRINKPDLPLVSGEMSIETAWILSIIVALTGLILTIKLNCGPLFISLYCVSLFAGFAYSVPPIRWKQYPFTNFLITISSHVGVNFTCYYASRAAFGLPFEMSPPFTFILAFMTVMGMTIAFAKDISDIEGDAKYGVSTVATKLGARNMTFVVSGVLLLTYVSAILAAIIWPQAFKSNVMLLSHAILAFCLIFQTRELALANYASAPSRQFFEFIWKLHYAEYLVYVFI

SEQ ID NO: 860 - protein, 323 aa, Artificial Sequence
  Synthetic
MSAGSDQIEGSPHHESDNSIATKILNFGHTFWKLQRPYVVKGMISIACGLFGRELFHNTNLLSWSLMLKAFSSLMVILSFNGFAAIMNQIYDVEIDRINKPDLPLVSGEMSIETAWILSIIVALTGLILTIKLNCGPLFISLYCVSIFAGFAYSVPPIRWKQYPFTNFLITISSHVGVNFTCYYASRAAFGLPFEMSPPFTFILAFMTVMGMTIAFAKDISDIEGDAKYGVSTVATKLGARNMTFVVSGVLLLTYVSAILAAIIWPQAFKSNVMLLSHAILAFCLIFQTRELALANYASAPSRQFFEFIWKLHYAEYLVYVFI

SEQ ID NO: 861 - protein, 323 aa, Artificial Sequence
  Synthetic
MSAGSDQIEGSPHHESDNSIATKILNFGHTFWKLQRPYVVKGLISIACGLFGRELFHNTNLLSWSLMLKAFSSLMVILSFNFFAAIMNQIYDVEIDRINKPDLPLVSGEMSIETAWILSIIVALTGLILTIKLNCGPLFISLYCVSIFAGFAYSVPPIRWKQYPFTNFLITISSHVGVNFTCYYASRAAFGLPFEMSPPFTFILAFMTVMGMTIAFAKDISDIEGDAKYGVSTVATKLGARNMTRVVSGVLLLTYVSAILAAIIWPQAFKSNVMLLSHAILAFCLIFQTRELALANYASAPSRQFFEFIWKLHYAEYLVYVFI

SEQ ID NO: 862 - protein, 323 aa, Artificial Sequence
  Synthetic
MSAGSDQIEGSPHHESDNSIATKILNFGHTCWKLQRPYVVKGMISIACGLFGRELFHNTNLLSWSLMLKAFSSLMVILSFNFFAAAVNQIYDVDIDRINKPDLPLVSGEMSIETAWILSIIVALTGLILTIKLNCGPLFISLYCVSIFAGFAYSVPPIRWKQYPFTNFLITISSHVGVNFTCYYASRAAFGLPFEMSPPFTFILAFMTVMGMTIAFAKDISDIEGDAKYGVSTVATKLGARNMTFVVSGVLLLTYVSAILAAIIWPQAFKSNVMLLSHAILAFCLIFQTRELALANYASAPSRQFFEFIWKLHYAEYLVYVFI

SEQ ID NO: 863 - protein, 323 aa, Artificial Sequence
  Synthetic
MSAGSDQIEGSPHHESDNSIATKILNFGHTCWKLQRPYVVKGMISIACGLFGRELFHNTNLLSWSLMLKAFSSLMVILSFNFFAATVNQIYDVDIDRINKPDLPLVSGEMSIETAWILSIIVALTGLILTIKLNCGPLFISLYCVSIFAGGAYSVPPIRWKQYPFTNFLITISSHVGVNFTCYYASRAAFGLPFEMSPPFTFILAFMTVMGMTIAFAKDISDIEGDAKYGVSTVATKLGARNMTFVVSGVLLLTYVSAILAAIIWPQAFKSNVMLLSHAILAFCLIFQTRELALANYASAPSRQFFEFIWKLHYAEYLVYVFI

SEQ ID NO: 864 - protein, 323 aa, Artificial Sequence
  Synthetic
MSAGSDQIEGSPHHESDNSIATKILNFGHTFWKLQRPYVVKGMISIACGLFGRELFHNTNLLSWSLMLKAFSSLMVILSFNFFAAVVNQIYDVDIDRINKPDLPLVSGEMSIETAWILSIIVALTGLILTIKLNCGPLFISLYCVSLFAGFAYSVPPIRWKQYPFTNFLITISSHVGVNFTCYYASRAAFGLPFEMSPPFTFILAFMTVMGMTIAFAKDISDIEGDAKYGVSTVATKLGARNMTFVVSGVLLLTYVSAILAAIIWPQAFKSNVMLLSHAILAFCLIFQTRELALANYASAPSRQFFEFIWKLHYAEYLVYVFI

SEQ ID NO: 865 - protein, 323 aa, Artificial Sequence
  Synthetic
MSAGSDQIEGSPHHESDNSIATKILNFGHTFWKLQRPYVVKGMISCACGLFGKELLHNTNLISWSLMFKAFFALVPILSFNFFAASMNQIYDVEIDRINKPDLPLVSGEMSIETAWILSIIVALTGLIVTIKMKGGPLFVFIYISGIFAGFAYSVPPIRWKQYPFTNFLITISSHVGLAFTSYYASRAALGLPFELRPSFSFIIAFMTVMGMTIAFAKDISDIEGDAKYGVSTVATKLGARNMTWVVSGVLLLNYLVSILAGIIWPFAFNSNVMILSHAILAFCLIFRTRELALANYASAPSRQFFEFIWRLYYAEYLVYVFI

SEQ ID NO: 866 - protein, 323 aa, Artificial Sequence
  Synthetic
MSAGSDQIEGSPHHESDNSIATKILNFGHTFWKLQRPYVVKGMISCACGLFGKELLHNTNLISWSLMFKAFFALVPILSFNFFAAAMNQIYDVEIDRINKPDLPLVSGEMSIETAWILSIIVALTGLIVTIKMKGGPLFVFIYIFGLFAGFAYSVPPIRWKQYPFTNFLITISSHVGLAFTSYYASRAALGLPFELRPSFSFIIAFMTVMGMTIAFAKDISDIEGDAKYGVSTVATKLGARNMTRVVSGVLLLNYLVSILAGIIWPFAFNSNVMILSHAILAFCLIFRTRELALANYASAPSRQFFEFIWKLYYAEYLVYVFI

SEQ ID NO: 867 - protein, 323 aa, Artificial Sequence
  Synthetic
MSAGSDQIEGSPHHESDNSIATKILNFGHTFWKLQRPYVVKGVISIACGLFGKELLHNTNLISWSLMFKAFFALVPILSFNFFAAIVNQIYDVEIDRINKPDLPLVSGEMSIRTAWILSIIVALTGLIVTIKMKGGPLFVFIYISGIFAGFAYSVPPIRWKQYPFTNFLITISSHVGLAFTSYYASRAALGLPFELRPSFSFIIAFMTVMGMTIAFAKDISDIEGDAKYGVSTVATKLGARNMTFVVSGVLLLNYLVSILAGIIWPFAFNSNVMILSHAILAFCLIFRTRELALANYASAPSRQFFEFIWRLYYAEYLVYVFI

SEQ ID NO: 868 - protein, 323 aa, Artificial Sequence
  Synthetic
MSAGSDQIEGSPHHESDNSIATKILNFGHTCWKLQRPYVVKGMISIACGLFGRELFHNTNLLSWSLMLKAFSSLMVILSFNFFAAVMNQIYDVEIDRINKPDLPLVSGEMSIETAWILSIIVALTGLILTIKLNCGPLFISLYCVSLFAGFAYSVPPIRWKQYPFTNFLITISSHVGVNFTCYYASRAAFGLPFEMSPPFTFILAFMTVMGMTIAFAKDISDIEGDAKYGVSTVATKLGARNMTRVVSGVLLLTYVSAILAAIIWPQAFKSNVMLLSHAILAFCLIFQTRELALANYASAPSRQFFEFIWKLHYAEYLVYVFI

SEQ ID NO: 869 - DNA, 969 bp, Artificial Sequence
  Synthetic
atgtcagccgggagcgaccagatagaaggaagtcctcatcacgagtctgataactccattgcgacaaaaatcctgaatttcggtcatacgttttggaagttacaaaggccctatgtcgtgaaaggtatgatttcgatagcttgtggcttgtttggtcgcgaactatttcataataccaaccttttatcttggtcattgatgctcaaggcattctcatccttaatggtaatcctttcttttaatggatttgctgccataatgaatcaaatttacgatgttgaaattgaccgaattaacaaaccagatttgccactcgttagtggagagatgagtatcgaaactgcatggatactatcgatcattgtcgctctgacaggcttaatattgactattaagcttaattgtggtccgctatttatatcattgtattgcgtatctattttcgctggatttgcatacagcgttcctccaattcgttggaaacagtatcctttcaccaacttcttaataactatcagctcacacgtgggtgttaactttacatgttattacgcctccagagcagcctttggcttacccttcgaaatgtctccgccatttacttttattctcgcttttatgaccgtaatgggaatgacaatagctttcgcgaaagacatttcagatatcgaaggtgatgcgaaatatggggtgtctactgttgctacgaagttaggtgcaagaaatatgacgagagttgtcagtggtgtcttgttgctgacatacgtaagcgctatacttgcagctatcatttggccgcaagcctttaagtcaaatgtgatgttgttatctcatgccatcctggcgttctgcctaattttccaaactagagagctagcgcttgcaaattatgcttctgcacctagtaggcagttttttgaatttatctggaaattgcattatgcagagtacttagtttatgttttcatc

SEQ ID NO: 870 - DNA, 969 bp, Artificial Sequence
  Synthetic
atgtcagccgggagcgaccagatagaaggaagtcctcatcacgagtctgataactccattgcgacaaaaatcctgaatttcggtcatacgtgctggaagttacaaaggccctatgtcgtgaaaggtttgatttcgatagcttgtggcttgtttggtcgcgaactatttcataataccaaccttttatcttggtcattgatgctcaaggcattctcatccttaatggtaatcctttcttttaatttctttgctgccagtatgaatcaaatttacgatgttgatattgaccgaattaacaaaccagatttgccactcgttagtggagagatgagtatcgaaactgcatggatactatcgatcattgtcgctctgacaggcttaatattgactattaagcttaattgtggtccgctatttatatcattgtattgcgtatctttattcgctggatttgcatacagcgttcctccaattcgttggaaacagtatcctttcaccaacttcttaataactatcagctcacacgtgggtgttaactttacatgttattacgcctccagagcagcctttggcttacccttcgaaatgtctccgccatttacttttattctcgcttttatgaccgtaatgggaatgacaatagctttcgcgaaagacatttcagatatcgaaggtgatgcgaaatatggggtgtctactgttgctacgaagttaggtgcaagaaatatgacgagagttgtcagtggtgtcttgttgctgacatacgtaagcgctatacttgcagctatcatttggccgcaagcctttaagtcaaatgtgatgttgttatctcatgccatcctggcgttctgcctaattttccaaactagagagctagcgcttgcaaattatgcttctgcacctagtaggcagttttttgaatttatctggaaattgcattatgcagagtacttagtttatgttttcatc

SEQ ID NO: 871 - DNA, 969 bp, Artificial Sequence
  Synthetic
atgtccgcaggatcagatcaaatagaagggagcccccatcacgagtcggacaacagtatcgcgacaaaaattcttaattttggccatactttctggaagttacagcgtccttacgtagttaaaggtgtcatttctatcgcttgcggtttgttcggtaaggaactactccacaatacgaacttgatatcatggtctttaatgtttaaagccttctttgctctggtcccaattctaagtttcaattttttcgcagccattgtgaatcaaatctatgatgttgaaatagataggattaacaagccggatttaccactcgtgtccggagaaatgtctataagaacagcttggatcctgtcgattattgtcgctcttactggcttgatagttaccattaaaatgaaaggtggccctttatttgtgtttatctatatattgggtatattcgcaggttttgcttactctgtacctccaattcgatggaagcagtatccgttcactaactttttgatcaccatttcaagccatgttggactagccttcacatcctactatgcttctagagccgcgcttggtctaccatttgaactgcgcccctcatttagttttataattgcattcatgacagttatggggatgactattgcctttgcaaaggacatttcagatattgaaggagatgcaaaatatggtgtctctacggtagctactaaattaggtgctagaaatatgacctgggttgtgtcgggggtgttgctattaaattacttagtcagtattttggcaggaataatctggccctttgcttttaattcaaatgtcatgatcttatcgcacgcaattttggccttctgtctcatctttaggacgagagaattagcccttgctaactacgcaagtgctccttcccgtcaatttttcgagtttatttggttgctgtattatgcggaatacctggtatacgttttcatt

SEQ ID NO: 872 - DNA, 969 bp, Artificial Sequence
  Synthetic
atgtccgcaggatcagatcaaatagaagggagcccccatcacgagtcggacaacagtatcgcgacaaaaattcttaattttggccatactttctggaagttacagcgtccttacgtagttaaaggtttgatttctatcgcttgcggtttgttcggtaaggaactactccacaatacgaacttgatatcatggtctttaatgtttaaagccttctttgctctggtcccaattctaagtttcaatggattcgcagccattatgaatcaaatctatgatgttgaaatagataggattaacaagccggatttaccactcgtgtccggagaaatgtctatacgcacagcttggatcctgtcgattattgtcgctcttactggcttgatagttaccattaaaatgaaaggtggccctttatttgtgtttatctatataacgggtatattcgcaggttttgcttactctgtacctccaattcgatggaagcagtatccgttcactaactttttgatcaccatttcaagccatgttggactagccttcacatcctactatgcttctagagccgcgcttggtctaccatttgaactgcgcccctcatttagttttataattgcattcatgacagttatggggatgactattgcctttgcaaaggacatttcagatattgaaggagatgcaaaatatggtgtctctacggtagctactaaattaggtgctagaaatatgaccagggttgtgtcgggggtgttgctattaaattacttagtcagtattttggcaggaataatctggcccttcgcttttaattcaaatgtcatgatcttatcgcacgcaattttggccttctgtctcatctttagaacgagagaattagcccttgctaactacgcaagtgctccttcccgtcaatttttcgagtttatttggttgctgtattatgcggaatacctggtatacgttttcatt

SEQ ID NO: 873 - DNA, 969 bp, Artificial Sequence
  Synthetic
atgtccgcaggatcagatcaaatagaagggagcccccatcacgagtcggacaacagtatcgcgacaaaaattcttaattttggccatacttgttggaagttacagcgtccttacgtagttaaaggtctaatttctatcgcttgcggtttgttcggtaaggaactactccacaatacgaacttgatatcatggtctttaatgtttaaagccttctttgctctggtcccaattctaagtttcaatggattcgcagccattatgaatcaaatctatgatgttgaaatagataggattaacaagccggatttaccactcgtgtccggagaaatgtctataagaacagcttggatcctgtcgattattgtcgctcttactggcttgatagttaccattaaaatgaaaggtggccctttatttgtgtttatctatatatctggtatattcgcaggttttgcttactctgtacctccaattcgatggaagcagtatccgttcactaactttttgatcaccatttcaagccatgttggactagccttcacatcctactatgcttctagagccgcgcttggtctaccatttgaactgcgcccctcatttagttttataattgcattcatgacagttatggggatgactattgcctttgcaaaggacatttcagatattgaaggagatgcaaaatatggtgtctctacggtagctactaaattaggtgctagaaatatgaccagggttgtgtcgggggtgttgctattaaattacttagtcagtattttggcaggaataatctggcccttcgcttttaattcaaatgtcatgatcttatcgcacgcaattttggccttctgtctcatctttagaacgagagaattagcccttgctaactacgcaagtgctccttcccgtcaatttttcgagtttatttggaaactgtattatgcggaatacctggtatacgttttcatt

SEQ ID NO: 874 - DNA, 969 bp, Artificial Sequence
  Synthetic
atgtccgcaggatcagatcaaatagaagggagcccccatcacgagtcggacaacagtatcgcgacaaaaattcttaattttggccatactttctggaagttacagcgtccttacgtagttaaaggtgtgatttctatcgcttgcggtttgttcggtaaggaactactccacaatacgaacttgatatcatggtctttaatgtttaaagccttctttgctctggtcccaattctaagtttcaattttttcgcagccattgttaatcaaatctatgatgttgagatagataggattaacaagccggatttaccactcgtgtccggagaaatgtctataagaacagcttggatcctgtcgattattgtcgctcttactggcttgatagttaccattaaaatgaaaggtggccctttatttgtgtttatctatatatttggtatattcgcaggttttgcttactctgtacctccaattcgatggaagcagtatccgttcactaactttttgatcaccatttcaagccatgttggactagccttcacatcctactatgcttctagagccgcgcttggtctaccatttgaactgcgcccctcatttagttttataattgcattcatgacagttatggggatgactattgcctttgcaaaggacatttcagatattgaaggagatgcaaaatatggtgtctctacggtagctactaaattaggtgctagaaatatgaccagagttgtgtcgggggtgttgctattaaattacttagtcagtattttggcaggaataatctggccctttgcttttaattcaaatgtcatgatcttatcgcacgcaattttggccttctgtctcatctttaggacgagagaattagcccttgctaactacgcaagtgctccttcccgtcaatttttcgagtttatttggaacctgtattatgcggaatacctggtatacgttttcatt

SEQ ID NO: 875 - DNA, 969 bp, Artificial Sequence
  Synthetic
atgtcagccgggagcgaccagatagaaggaagtcctcatcacgagtctgataactccattgcgacaaaaatcctgaatttcggtcatacgtgctggaagttacaaaggccctatgtcgtgaaaggtatgatttcgatagcttgtggcttgtttggtcgcgaactatttcataataccaaccttttatcttggtcattgatgctcaaggcattctcatccttaatggtaatcctttcttttaatttctttgctgccgcaatgaatcaaatttacgatgttgaaattgaccgaattaacaaaccagatttgccactcgttagtggagagatgagtatcgaaactgcatggatactatcgatcattgtcgctctgacaggcttaatattgactattaagcttaattgtggtccgctatttatatcattgtattgcgtatctttattcgctggatttgcatacagcgttcctccaattcgttggaaacagtatcctttcaccaacttcttaataactatcagctcacacgtgggtgttaactttacatgttattacgcctccagagcagcctttggcttacccttcgaaatgtctccgccatttacttttattctcgcttttatgaccgtaatgggaatgacaatagctttcgcgaaagacatttcagatatcgaaggtgatgcgaaatatggggtgtctactgttgctacgaagttaggtgcaagaaatatgacgagagttgtcagtggtgtcttgttgctgacatacgtaagcgctatacttgcagctatcatttggccgcaagcctttaagtcaaatgtgatgttgttatctcatgccatcctggcgttctgcctaattttccaaactagagagctagcgcttgcaaattatgcttctgcacctagtaggcagttttttgaatttatctggaaattgcattatgcagagtacttagtttatgttttcatc

SEQ ID NO: 876 - DNA, 969 bp, Artificial Sequence
  Synthetic
atgtccgcaggatcagatcaaatagaagggagcccccatcacgagtcggacaacagtatcgcgacaaaaattcttaattttggccatactttctggaagttacagcgtccttacgtagttaaaggtatgatttcttgtgcttgcggtttgttcggtaaggaactactccacaatacgaacttgatatcatggtctttaatgtttaaagccttctttgctctggtcccaattctaagtttcaattttttcgcagccgctatgaatcaaatctatgatgttgaaatagataggattaacaagccggatttaccactcgtgtccggagaaatgtctatacgaacagcttggatcctgtcgattattgtcgctcttactggcttgatagttaccattaaaatgaaaggtggccctttatttgtgtttatctatataacaggtatattcgcaggttttgcttactctgtacctccaattcgatggaagcagtatccgttcactaactttttgatcaccatttcaagccatgttggactagccttcacatcctactatgcttctagagccgcgcttggtctaccatttgaactgcgcccctcatttagttttataattgcattcatgacagttatggggatgactattgcctttgcaaaggacatttcagatattgaaggagatgcaaaatatggtgtctctacggtagctactaaattaggtgctagaaatatgaccagggttgtgtcgggggtgttgctattaaattacttagtcagtattttggcaggaataatctggcccttcgcttttaattcaaatgtcatgatcttatcgcacgcaattttggccttctgtctcatctttagaacgagagaattagcccttgctaactacgcaagtgctccttcccgtcaatttttcgagtttatttggttgctgtattatgcggaatacctggtatacgttttcatt

SEQ ID NO: 877 - DNA, 969 bp, Artificial Sequence
  Synthetic
atgtccgcaggatcagatcaaatagaagggagcccccatcacgagtcggacaacagtatcgcgacaaaaattcttaattttggccatactttctggaagttacagcgtccttacgtagttaaaggtgtcatttctatcgcttgcggtttgttcggtaaggaactactccacaatacgaacttgatatcatggtctttaatgtttaaagccttctttgctctggtcccaattctaagtttcaattttttcgcagccattgttaatcaaatctatgatgttgaaatagataggattaacaagccggatttaccactcgtgtccggagaaatgtctatagagacagcttggatcctgtcgattattgtcgctcttactggcttgatagttaccattaaaatgaaaggtggccctttatttgtgtttatctatataacaggtatattcgcaggttttgcttactctgtacctccaattcgatggaagcagtatccgttcactaactttttgatcaccatttcaagccatgttggactagccttcacatcctactatgcttctagagccgcgcttggtctaccatttgaactgcgcccctcatttagttttataattgcattcatgacagttatggggatgactattgcctttgcaaaggacatttcagatattgaaggagatgcaaaatatggtgtctctacggtagctactaaattaggtgctagaaatatgaccagggttgtgtcgggggtgttgctattaaattacttagtcagtattttggcaggaataatctggccctttgcttttaattcaaatgtcatgatcttatcgcacgcaattttggccttctgtctcatctttagaacgagagaattagcccttgctaactacgcaagtgctccttcccgtcaatttttcgagtttatttggaacctgtattatgcggaatacctggtatacgttttcatt

SEQ ID NO: 878 - DNA, 969 bp, Artificial Sequence
  Synthetic
atgtccgcaggatcagatcaaatagaagggagcccccatcacgagtcggacaacagtatcgcgacaaaaattcttaattttggccatactttctggaagttacagcgtccttacgtagttaaaggtatgatttctatcgcttgcggtttgttcggtaaggaactactccacaatacgaacttgatatcatggtctttaatgtttaaagccttctttgctctggtcccaattctaagtttcaattttttcgcagccggtatgaatcaaatctatgatgttgaaatagataggattaacaagccggatttaccactcgtgtccggagaaatgtctatacgaacagcttggatcctgtcgattattgtcgctcttactggcttgatagttaccattaaaatgaaaggtggccctttatttgtgtttatctatataacaggtatattcgcaggttttgcttactctgtacctccaattcgatggaagcagtatccgttcactaactttttgatcaccatttcaagccatgttggactagccttcacatcctactatgcttctagagccgcgcttggtctaccatttgaactgcgcccctcatttagttttataattgcattcatgacagttatggggatgactattgcctttgcaaaggacatttcagatattgaaggagatgcaaaatatggtgtctctacggtagctactaaattaggtgctagaaatatgacctgggttgtgtcgggggtgttgctattaaattacttagtcagtattttggcaggaataatctggccctttgcttttaattcaaatgtcatgatcttatcgcacgcaattttggccttctgtctcatctttaggacgagagaattagcccttgctaactacgcaagtgctccttcccgtcaatttttcgagtttatttggaatctgtattatgcggaatacctggtatacgttttcatt

SEQ ID NO: 879 - DNA, 969 bp, Artificial Sequence
  Synthetic
atgtcagccgggagcgaccagatagaaggaagtcctcatcacgagtctgataactccattgcgacaaaaatcctgaatttcggtcatacgtgctggaagttacaaaggccctatgtcgtgaaaggtatgatttcgatagcttgtggcttgtttggtcgcgaactatttcataataccaaccttttatcttggtcattgatgctcaaggcattctcatccttaatggtaatcctttcttttaatttctttgctgccgttatgaatcaaatttacgatgttgatattgaccgaattaacaaaccagatttgccactcgttagtggagagatgagtatcgaaactgcatggatactatcgatcattgtcgctctgacaggcttaatattgactattaagcttaattgtggtccgctatttatatcattgtattgcgtatctattttcgctggatttgcatacagcgttcctccaattcgttggaaacagtatcctttcaccaacttcttaataactatcagctcacacgtgggtgttaactttacatgttattacgcctccagagcagcctttggcttacccttcgaaatgtctccgccatttacttttattctcgcttttatgaccgtaatgggaatgacaatagctttcgcgaaagacatttcagatatcgaaggtgatgcgaaatatggggtgtctactgttgctacgaagttaggtgcaagaaatatgacgagagttgtcagtggtgtcttgttgctgacatacgtaagcgctatacttgcagctatcatttggccgcaagcctttaagtcaaatgtgatgttgttatctcatgccatcctggcgttctgcctaattttccaaactagagagctagcgcttgcaaattatgcttctgcacctagtaggcagttttttgaatttatctggaaattgcattatgcagagtacttagtttatgttttcatc

SEQ ID NO: 880 - DNA, 969 bp, Artificial Sequence
  Synthetic
atgtccgcaggatcagatcaaatagaagggagcccccatcacgagtcggacaacagtatcgcgacaaaaattcttaattttggccatactttctggaagttacagcgtccttacgtagttaaaggtatgatttcttgcgcttgcggtttgttcggtaaggaactactccacaatacgaacttgatatcatggtctttaatgtttaaagccttctttgctctggtcccaattctaagtttcaattttttcgcagccggaatgaatcaaatctatgatgttgagatagataggattaacaagccggatttaccactcgtgtccggagaaatgtctataagaacagcttggatcctgtcgattattgtcgctcttactggcttgatagttaccattaaaatgaaaggtggccctttatttgtgtttatctatatatttggtatattcgcaggttttgcttactctgtacctccaattcgatggaagcagtatccgttcactaactttttgatcaccatttcaagccatgttggactagccttcacatcctactatgcttctagagccgcgcttggtctaccatttgaactgcgcccctcatttagttttataattgcattcatgacagttatggggatgactattgcctttgcaaaggacatttcagatattgaaggagatgcaaaatatggtgtctctacggtagctactaaattaggtgctagaaatatgacccgggttgtgtcgggggtgttgctattaaattacttagtcagtattttggcaggaataatctggccctttgcttttaattcaaatgtcatgatcttatcgcacgcaattttggccttctgtctcatctttagaacgagagaattagcccttgctaactacgcaagtgctccttcccgtcaatttttcgagtttatttggaatctgtattatgcggaatacctggtatacgttttcatt

SEQ ID NO: 881 - DNA, 969 bp, Artificial Sequence
  Synthetic
atgtccgcaggatcagatcaaatagaagggagcccccatcacgagtcggacaacagtatcgcgacaaaaattcttaattttggccatactttctggaagttacagcgtccttacgtagttaaaggtgtgatttctatcgcttgcggtttgttcggtaaggaactactccacaatacgaacttgatatcatggtctttaatgtttaaagccttctttgctctggtcccaattctaagtttcaattttttcgcagccattgtcaatcaaatctatgatgttgaaatagataggattaacaagccggatttaccactcgtgtccggagaaatgtctataagaacagcttggatcctgtcgattattgtcgctcttactggcttgatagttaccattaaaatgaaaggtggccctttatttgtgtttatctatatattgggtatattcgcaggttttgcttactctgtacctccaattcgatggaagcagtatccgttcactaactttttgatcaccatttcaagccatgttggactagccttcacatcctactatgcttctagagccgcgcttggtctaccatttgaactgcgcccctcatttagttttataattgcattcatgacagttatggggatgactattgcctttgcaaaggacatttcagatattgaaggagatgcaaaatatggtgtctctacggtagctactaaattaggtgctagaaatatgacccgtgttgtgtcgggggtgttgctattaaattacttagtcagtattttggcaggaataatctggccccaagcttttaattcaaatgtcatgatcttatcgcacgcaattttggccttctgtctcatctttagaacgagagaattagcccttgctaactacgcaagtgctccttcccgtcaatttttcgagtttatttggcgactgtattatgcggaatacctggtatacgttttcatt

SEQ ID NO: 882 - DNA, 969 bp, Artificial Sequence
  Synthetic
atgtcagccgggagcgaccagatagaaggaagtcctcatcacgagtctgataactccattgcgacaaaaatcctgaatttcggtcatacgttttggaagttacaaaggccctatgtcgtgaaaggtctaatttcgatagcttgtggcttgtttggtcgcgaactatttcataataccaaccttttatcttggtcattgatgctcaaggcattctcatccttaatggtaatcctttcttttaatttctttgctgccgcaatgaatcaaatttacgatgttgatattgaccgaattaacaaaccagatttgccactcgttagtggagagatgagtatcgaaactgcatggatactatcgatcattgtcgctctgacaggcttaatattgactattaagcttaattgtggtccgctatttatatcattgtattgcgtatctctgttcgctggatttgcatacagcgttcctccaattcgttggaaacagtatcctttcaccaacttcttaataactatcagctcacacgtgggtgttaactttacatgttattacgcctccagagcagcctttggcttacccttcgaaatgtctccgccatttacttttattctcgcttttatgaccgtaatgggaatgacaatagctttcgcgaaagacatttcagatatcgaaggtgatgcgaaatatggggtgtctactgttgctacgaagttaggtgcaagaaatatgacgtttgttgtcagtggtgtcttgttgctgacatacgtaagcgctatacttgcagctatcatttggccgcaagcctttaagtcaaatgtgatgttgttatctcatgccatcctggcgttctgcctaattttccaaactagagagctagcgcttgcaaattatgcttctgcacctagtaggcagttttttgaatttatctggaaattgcattatgcagagtacttagtttatgttttcatc

SEQ ID NO: 883 - DNA, 969 bp, Artificial Sequence
  Synthetic
atgtcagccgggagcgaccagatagaaggaagtcctcatcacgagtctgataactccattgcgacaaaaatcctgaatttcggtcatacgtgctggaagttacaaaggccctatgtcgtgaaaggtatgatttcgatagcttgtggcttgtttggtcgcgaactatttcataataccaaccttttatcttggtcattgatgctcaaggcattctcatccttaatggtaatcctttcttttaatttctttgctgccagcatgaatcaaatttacgatgttgagattgaccgaattaacaaaccagatttgccactcgttagtggagagatgagtatcgaaactgcatggatactatcgatcattgtcgctctgacaggcttaatattgactattaagcttaattgtggtccgctatttatatcattgtattgcgtatctattttcgctggatttgcatacagcgttcctccaattcgttggaaacagtatcctttcaccaacttcttaataactatcagctcacacgtgggtgttaactttacatgttattacgcctccagagcagcctttggcttacccttcgaaatgtctccgccatttacttttattctcgcttttatgaccgtaatgggaatgacaatagctttcgcgaaagacatttcagatatcgaaggtgatgcgaaatatggggtgtctactgttgctacgaagttaggtgcaagaaatatgacgagagttgtcagtggtgtcttgttgctgacatacgtaagcgctatacttgcagctatcatttggccgcaagcctttaagtcaaatgtgatgttgttatctcatgccatcctggcgttctgcctaattttccaaactagagagctagcgcttgcaaattatgcttctgcacctagtaggcagttttttgaatttatctggaaattgcattatgcagagtacttagtttatgttttcatc

SEQ ID NO: 884 - DNA, 969 bp, Artificial Sequence
  Synthetic
atgtccgcaggatcagatcaaatagaagggagcccccatcacgagtcggacaacagtatcgcgacaaaaattcttaattttggccatactttctggaagttacagcgtccttacgtagttaaaggtctgatttctatcgcttgcggtttgttcggtaaggaactactccacaatacgaacttgatatcatggtctttaatgtttaaagccttctttgctctggtcccaattctaagtttcaattttttcgcagcctcaatgaatcaaatctatgatgttgaaatagataggattaacaagccggatttaccactcgtgtccggagaaatgtctataagaacagcttggatcctgtcgattattgtcgctcttactggcttgatagttaccattaaaatgaaaggtggccctttatttgtgtttatctatataagcggtatattcgcaggttttgcttactctgtacctccaattcgatggaagcagtatccgttcactaactttttgatcaccatttcaagccatgttggactagccttcacatcctactatgcttctagagccgcgcttggtctaccatttgaactgcgcccctcatttagttttataattgcattcatgacagttatggggatgactattgcctttgcaaaggacatttcagatattgaaggagatgcaaaatatggtgtctctacggtagctactaaattaggtgctagaaatatgacccgtgttgtgtcgggggtgttgctattaaattacttagtcagtattttggcaggaataatctggcccttcgcttttaattcaaatgtcatgatcttatcgcacgcaattttggccttctgtctcatctttcaaacgagagaattagcccttgctaactacgcaagtgctccttcccgtcaatttttcgagtttatttggaaactgtattatgcggaatacctggtatacgttttcatt

SEQ ID NO: 885 - DNA, 969 bp, Artificial Sequence
  Synthetic
atgtcagccgggagcgaccagatagaaggaagtcctcatcacgagtctgataactccattgcgacaaaaatcctgaatttcggtcatacgttttggaagttacaaaggccctatgtcgtgaaaggtctaatttcgatagcttgtggcttgtttggtcgcgaactatttcataataccaaccttttatcttggtcattgatgctcaaggcattctcatccttaatggtaatcctttcttttaatttctttgctgccgttatgaatcaaatttacgatgttgagattgaccgaattaacaaaccagatttgccactcgttagtggagagatgagtatcgaaactgcatggatactatcgatcattgtcgctctgacaggcttaatattgactattaagcttaattgtggtccgctatttatatcattgtattgcgtatctattttcgctggatttgcatacagcgttcctccaattcgttggaaacagtatcctttcaccaacttcttaataactatcagctcacacgtgggtgttaactttacatgttattacgcctccagagcagcctttggcttacccttcgaaatgtctccgccatttacttttattctcgcttttatgaccgtaatgggaatgacaatagctttcgcgaaagacatttcagatatcgaaggtgatgcgaaatatggggtgtctactgttgctacgaagttaggtgcaagaaatatgacgtttgttgtcagtggtgtcttgttgctgacatacgtaagcgctatacttgcagctatcatttggccgcaagcctttaagtcaaatgtgatgttgttatctcatgccatcctggcgttctgcctaattttccaaactagagagctagcgcttgcaaattatgcttctgcacctagtaggcagttttttgaatttatctggaaattgcattatgcagagtacttagtttatgttttcatc

SEQ ID NO: 886 - DNA, 969 bp, Artificial Sequence
  Synthetic
atgtccgcaggatcagatcaaatagaagggagcccccatcacgagtcggacaacagtatcgcgacaaaaattcttaattttggccatactttctggaagttacagcgtccttacgtagttaaaggtatgatttcttgtgcttgcggtttgttcggtaaggaactactccacaatacgaacttgatatcatggtctttaatgtttaaagccttctttgctctggtcccaattctaagtttcaatgggttcgcagccattatgaatcaaatctatgatgttgaaatagataggattaacaagccggatttaccactcgtgtccggagaaatgtctatacgcacagcttggatcctgtcgattattgtcgctcttactggcttgatagttaccattaaaatgaaaggtggccctttatttgtgtttatctatatatttggtttgttcgcaggttttgcttactctgtacctccaattcgatggaagcagtatccgttcactaactttttgatcaccatttcaagccatgttggactagccttcacatcctactatgcttctagagccgcgcttggtctaccatttgaactgcgcccctcatttagttttataattgcattcatgacagttatggggatgactattgcctttgcaaaggacatttcagatattgaaggagatgcaaaatatggtgtctctacggtagctactaaattaggtgctagaaatatgaccttcgttgtgtcgggggtgttgctattaaattacttagtcagtattttggcaggaataatctggccctttgcttttaattcaaatgtcatgatcttatcgcacgcaattttggccttctgtctcatctttagaacgagagaattagcccttgctaactacgcaagtgctccttcccgtcaatttttcgagtttatttggaacctgtattatgcggaatacctggtatacgttttcatt

SEQ ID NO: 887 - DNA, 969 bp, Artificial Sequence
  Synthetic
atgtcagccgggagcgaccagatagaaggaagtcctcatcacgagtctgataactccattgcgacaaaaatcctgaatttcggtcatacgttttggaagttacaaaggccctatgtcgtgaaaggtttgatttcgatagcttgtggcttgtttggtcgcgaactatttcataataccaaccttttatcttggtcattgatgctcaaggcattctcatccttaatggtaatcctttcttttaatttctttgctgccgcaatgaatcaaatttacgatgttgatattgaccgaattaacaaaccagatttgccactcgttagtggagagatgagtatcgaaactgcatggatactatcgatcattgtcgctctgacaggcttaatattgactattaagcttaattgtggtccgctatttatatcattgtattgcgtatctattttcgctggatttgcatacagcgttcctccaattcgttggaaacagtatcctttcaccaacttcttaataactatcagctcacacgtgggtgttaactttacatgttattacgcctccagagcagcctttggcttacccttcgaaatgtctccgccatttacttttattctcgcttttatgaccgtaatgggaatgacaatagctttcgcgaaagacatttcagatatcgaaggtgatgcgaaatatggggtgtctactgttgctacgaagttaggtgcaagaaatatgacgagagttgtcagtggtgtcttgttgctgacatacgtaagcgctatacttgcagctatcatttggccgcaagcctttaagtcaaatgtgatgttgttatctcatgccatcctggcgttctgcctaattttccaaactagagagctagcgcttgcaaattatgcttctgcacctagtaggcagttttttgaatttatctggaaattgcattatgcagagtacttagtttatgttttcatc

SEQ ID NO: 888 - DNA, 969 bp, Artificial Sequence
  Synthetic
atgtcagccgggagcgaccagatagaaggaagtcctcatcacgagtctgataactccattgcgacaaaaatcctgaatttcggtcatacgttttggaagttacaaaggccctatgtcgtgaaaggtatgatttcgatagcttgtggcttgtttggtcgcgaactatttcataataccaaccttttatcttggtcattgatgctcaaggcattctcatccttaatggtaatcctttcttttaatttctttgctgccgctatgaatcaaatttacgatgttgatattgaccgaattaacaaaccagatttgccactcgttagtggagagatgagtatcgaaactgcatggatactatcgatcattgtcgctctgacaggcttaatattgactattaagcttaattgtggtccgctatttatatcattgtattgcgtatctattttcgctggatttgcatacagcgttcctccaattcgttggaaacagtatcctttcaccaacttcttaataactatcagctcacacgtgggtgttaactttacatgttattacgcctccagagcagcctttggcttacccttcgaaatgtctccgccatttacttttattctcgcttttatgaccgtaatgggaatgacaatagctttcgcgaaagacatttcagatatcgaaggtgatgcgaaatatggggtgtctactgttgctacgaagttaggtgcaagaaatatgacgagagttgtcagtggtgtcttgttgctgacatacgtaagcgctatacttgcagctatcatttggccgcaagcctttaagtcaaatgtgatgttgttatctcatgccatcctggcgttctgcctaattttccaaactagagagctagcgcttgcaaattatgcttctgcacctagtaggcagttttttgaatttatctggaaattgcattatgcagagtacttagtttatgttttcatc

SEQ ID NO: 889 - DNA, 969 bp, Artificial Sequence
  Synthetic
atgtccgcaggatcagatcaaatagaagggagcccccatcacgagtcggacaacagtatcgcgacaaaaattcttaattttggccatactttctggaagttacagcgtccttacgtagttaaaggtctaatttctatcgcttgcggtttgttcggtaaggaactactccacaatacgaacttgatatcatggtctttaatgtttaaagccttctttgctctggtcccaattctaagtttcaattttttcgcagcctctatgaatcaaatctatgatgttgacatagataggattaacaagccggatttaccactcgtgtccggagaaatgtctatacgcacagcttggatcctgtcgattattgtcgctcttactggcttgatagttaccattaaaatgaaaggtggccctttatttgtgtttatctatatattgggtatattcgcaggttttgcttactctgtacctccaattcgatggaagcagtatccgttcactaactttttgatcaccatttcaagccatgttggactagccttcacatcctactatgcttctagagccgcgcttggtctaccatttgaactgcgcccctcatttagttttataattgcattcatgacagttatggggatgactattgcctttgcaaaggacatttcagatattgaaggagatgcaaaatatggtgtctctacggtagctactaaattaggtgctagaaatatgaccagagttgtgtcgggggtgttgctattaaattacttagtcagtattttggcaggaataatctggccctttgcttttaattcaaatgtcatgatcttatcgcacgcaattttggccttctgtctcatctttaggacgagagaattagcccttgctaactacgcaagtgctccttcccgtcaatttttcgagtttatttggaggctgtattatgcggaatacctggtatacgttttcatt

SEQ ID NO: 890 - DNA, 969 bp, Artificial Sequence
  Synthetic
atgtccgcaggatcagatcaaatagaagggagcccccatcacgagtcggacaacagtatcgcgacaaaaattcttaattttggccatactttctggaagttacagcgtccttacgtagttaaaggtatgatttcttgcgcttgcggtttgttcggtaaggaactactccacaatacgaacttgatatcatggtctttaatgtttaaagccttctttgctctggtcccaattctaagtttcaattttttcgcagccattgttaatcaaatctatgatgttgaaatagataggattaacaagccggatttaccactcgtgtccggagaaatgtctataagaacagcttggatcctgtcgattattgtcgctcttactggcttgatagttaccattaaaatgaaaggtggccctttatttgtgtttatctatatattgggtatattcgcaggttttgcttactctgtacctccaattcgatggaagcagtatccgttcactaactttttgatcaccatttcaagccatgttggactagccttcacatcctactatgcttctagagccgcgcttggtctaccatttgaactgcgcccctcatttagttttataattgcattcatgacagttatggggatgactattgcctttgcaaaggacatttcagatattgaaggagatgcaaaatatggtgtctctacggtagctactaaattaggtgctagaaatatgaccttcgttgtgtcgggggtgttgctattaaattacttagtcagtattttggcaggaataatctggccctttgcttttaattcaaatgtcatgatcttatcgcacgcaattttggccttctgtctcatctttaggacgagagaattagcccttgctaactacgcaagtgctccttcccgtcaatttttcgagtttatttggaacctgtattatgcggaatacctggtatacgttttcatt

SEQ ID NO: 891 - DNA, 969 bp, Artificial Sequence
  Synthetic
atgtcagccgggagcgaccagatagaaggaagtcctcatcacgagtctgataactccattgcgacaaaaatcctgaatttcggtcatacgtgctggaagttacaaaggccctatgtcgtgaaaggtatgatttcgatagcttgtggcttgtttggtcgcgaactatttcataataccaaccttttatcttggtcattgatgctcaaggcattctcatccttaatggtaatcctttcttttaatttctttgctgcctccatgaatcaaatttacgatgttgagattgaccgaattaacaaaccagatttgccactcgttagtggagagatgagtatcgaaactgcatggatactatcgatcattgtcgctctgacaggcttaatattgactattaagcttaattgtggtccgctatttatatcattgtattgcgtatctattttcgctggatttgcatacagcgttcctccaattcgttggaaacagtatcctttcaccaacttcttaataactatcagctcacacgtgggtgttaactttacatgttattacgcctccagagcagcctttggcttacccttcgaaatgtctccgccatttacttttattctcgcttttatgaccgtaatgggaatgacaatagctttcgcgaaagacatttcagatatcgaaggtgatgcgaaatatggggtgtctactgttgctacgaagttaggtgcaagaaatatgacgtttgttgtcagtggtgtcttgttgctgacatacgtaagcgctatacttgcagctatcatttggccgcaagcctttaagtcaaatgtgatgttgttatctcatgccatcctggcgttctgcctaattttccaaactagagagctagcgcttgcaaattatgcttctgcacctagtaggcagttttttgaatttatctggaaattgcattatgcagagtacttagtttatgttttcatc

SEQ ID NO: 892 - DNA, 969 bp, Artificial Sequence
  Synthetic
atgtcagccgggagcgaccagatagaaggaagtcctcatcacgagtctgataactccattgcgacaaaaatcctgaatttcggtcatacgtgctggaagttacaaaggccctatgtcgtgaaaggtatgatttcgatagcttgtggcttgtttggtcgcgaactatttcataataccaaccttttatcttggtcattgatgctcaaggcattctcatccttaatggtaatcctttcttttaatttctttgctgccactattaatcaaatttacgatgttgatattgaccgaattaacaaaccagatttgccactcgttagtggagagatgagtatcgaaactgcatggatactatcgatcattgtcgctctgacaggcttaatattgactattaagcttaattgtggtccgctatttatatcattgtattgcgtatctattttcgctggaaccgcatacagcgttcctccaattcgttggaaacagtatcctttcaccaacttcttaataactatcagctcacacgtgggtgttaactttacatgttattacgcctccagagcagcctttggcttacccttcgaaatgtctccgccatttacttttattctcgcttttatgaccgtaatgggaatgacaatagctttcgcgaaagacatttcagatatcgaaggtgatgcgaaatatggggtgtctactgttgctacgaagttaggtgcaagaaatatgacgtttgttgtcagtggtgtcttgttgctgacatacgtaagcgctatacttgcagctatcatttggccgcaagcctttaagtcaaatgtgatgttgttatctcatgccatcctggcgttctgcctaattttccaaactagagagctagcgcttgcaaattatgcttctgcacctagtaggcagttttttgaatttatctggaaattgcattatgcagagtacttagtttatgttttcatc

SEQ ID NO: 893 - DNA, 969 bp, Artificial Sequence
  Synthetic
atgtcagccgggagcgaccagatagaaggaagtcctcatcacgagtctgataactccattgcgacaaaaatcctgaatttcggtcatacgtgctggaagttacaaaggccctatgtcgtgaaaggtttgatttcgatagcttgtggcttgtttggtcgcgaactatttcataataccaaccttttatcttggtcattgatgctcaaggcattctcatccttaatggtaatcctttcttttaatttctttgctgccagtatgaatcaaatttacgatgttgaaattgaccgaattaacaaaccagatttgccactcgttagtggagagatgagtatcgaaactgcatggatactatcgatcattgtcgctctgacaggcttaatattgactattaagcttaattgtggtccgctatttatatcattgtattgcgtatctattttcgctggatttgcatacagcgttcctccaattcgttggaaacagtatcctttcaccaacttcttaataactatcagctcacacgtgggtgttaactttacatgttattacgcctccagagcagcctttggcttacccttcgaaatgtctccgccatttacttttattctcgcttttatgaccgtaatgggaatgacaatagctttcgcgaaagacatttcagatatcgaaggtgatgcgaaatatggggtgtctactgttgctacgaagttaggtgcaagaaatatgacgtttgttgtcagtggtgtcttgttgctgacatacgtaagcgctatacttgcagctatcatttggccgcaagcctttaagtcaaatgtgatgttgttatctcatgccatcctggcgttctgcctaattttccaaactagagagctagcgcttgcaaattatgcttctgcacctagtaggcagttttttgaatttatctggaaattgcattatgcagagtacttagtttatgttttcatc

SEQ ID NO: 894 - DNA, 969 bp, Artificial Sequence
  Synthetic
atgtcagccgggagcgaccagatagaaggaagtcctcatcacgagtctgataactccattgcgacaaaaatcctgaatttcggtcatacgtgctggaagttacaaaggccctatgtcgtgaaaggtatgatttcgatagcttgtggcttgtttggtcgcgaactatttcataataccaaccttttatcttggtcattgatgctcaaggcattctcatccttaatggtaatcctttcttttaatttctacgctgccgcaactaatcaaatttacgatgttgatattgaccgaattaacaaaccagatttgccactcgttagtggagagatgagtatcgaaactgcatggatactatcgatcattgtcgctctgacaggcttaatattgactattaagcttaattgtggtccgctatttatatcattgtattgcgtatctattttcgctggatttgcatacagcgttcctccaattcgttggaaacagtatcctttcaccaacttcttaataactatcagctcacacgtgggtgttaactttacatgttattacgcctccagagcagcctttggcttacccttcgaaatgtctccgccatttacttttattctcgcttttatgaccgtaatgggaatgacaatagctttcgcgaaagacatttcagatatcgaaggtgatgcgaaatatggggtgtctactgttgctacgaagttaggtgcaagaaatatgacgtttgttgtcagtggtgtcttgttgctgacatacgtaagcgctatacttgcagctatcatttggccgcaagcctttaagtcaaatgtgatgttgttatctcatgccatcctggcgttctgcctaattttccaaactagagagctagcgcttgcaaattatgcttctgcacctagtaggcagttttttgaatttatctggaaattgcattatgcagagtacttagtttatgttttcatc

SEQ ID NO: 895 - DNA, 969 bp, Artificial Sequence
  Synthetic
atgtccgcaggatcagatcaaatagaagggagcccccatcacgagtcggacaacagtatcgcgacaaaaattcttaattttggccatactttctggaagttacagcgtccttacgtagttaaaggtctgatttctatcgcttgcggtttgttcggtaaggaactactccacaatacgaacttgatatcatggtctttaatgtttaaagccttctttgctctggtcccaattctaagtttcaatggattcgcagccggcatgaatcaaatctatgatgttgaaatagataggattaacaagccggatttaccactcgtgtccggagaaatgtctatagagacagcttggatcctgtcgattattgtcgctcttactggcttgatagttaccattaaaatgaaaggtggccctttatttgtgtttatctatatacttggtttgttcgcaggttttgcttactctgtacctccaattcgatggaagcagtatccgttcactaactttttgatcaccatttcaagccatgttggactagccttcacatcctactatgcttctagagccgcgcttggtctaccatttgaactgcgcccctcatttagttttataattgcattcatgacagttatggggatgactattgcctttgcaaaggacatttcagatattgaaggagatgcaaaatatggtgtctctacggtagctactaaattaggtgctagaaatatgacccgggttgtgtcgggggtgttgctattaaattacttagtcagtattttggcaggaataatctggccccaagcttttaattcaaatgtcatgatcttatcgcacgcaattttggccttctgtctcatctttcaaacgagagaattagcccttgctaactacgcaagtgctccttcccgtcaatttttcgagtttatttggaacctgtattatgcggaatacctggtatacgttttcatt

SEQ ID NO: 896 - DNA, 969 bp, Artificial Sequence
  Synthetic
atgtcagccgggagcgaccagatagaaggaagtcctcatcacgagtctgataactccattgcgacaaaaatcctgaatttcggtcatacgtgctggaagttacaaaggccctatgtcgtgaaaggtatgatttcgatagcttgtggcttgtttggtcgcgaactatttcataataccaaccttttatcttggtcattgatgctcaaggcattctcatccttaatggtaatcctttcttttaatttctttgctgccgttactaatcaaatttacgatgttgatattgaccgaattaacaaaccagatttgccactcgttagtggagagatgagtatcgaaactgcatggatactatcgatcattgtcgctctgacaggcttaatattgactattaagcttaattgtggtccgctatttatatcattgtattgcgtatctattttcgctggatttgcatacagcgttcctccaattcgttggaaacagtatcctttcaccaacttcttaataactatcagctcacacgtgggtgttaactttacatgttattacgcctccagagcagcctttggcttacccttcgaaatgtctccgccatttacttttattctcgcttttatgaccgtaatgggaatgacaatagctttcgcgaaagacatttcagatatcgaaggtgatgcgaaatatggggtgtctactgttgctacgaagttaggtgcaagaaatatgacgtttgttgtcagtggtgtcttgttgctgacatacgtaagcgctatacttgcagctatcatttggccgcaagcctttaagtcaaatgtgatgttgttatctcatgccatcctggcgttctgcctaattttccaaactagagagctagcgcttgcaaattatgcttctgcacctagtaggcagttttttgaatttatctggaaattgcattatgcagagtacttagtttatgttttcatc

SEQ ID NO: 897 - DNA, 969 bp, Artificial Sequence
  Synthetic
atgtcagccgggagcgaccagatagaaggaagtcctcatcacgagtctgataactccattgcgacaaaaatcctgaatttcggtcatacgtgctggaagttacaaaggccctatgtcgtgaaaggtatgatttcgatagcttgtggcttgtttggtcgcgaactatttcataataccaaccttttatcttggtcattgatgctcaaggcattctcatccttaatggtaatcctttcttttaatttctttgctgccgttatgaatcaaatttacgatgttgatattgaccgaattaacaaaccagatttgccactcgttagtggagagatgagtatcgaaactgcatggatactatcgatcattgtcgctctgacaggcttaatattgactattaagcttaattgtggtccgctatttatatcattgtattgcgtatctttattcgctggatttgcatacagcgttcctccaattcgttggaaacagtatcctttcaccaacttcttaataactatcagctcacacgtgggtgttaactttacatgttattacgcctccagagcagcctttggcttacccttcgaaatgtctccgccatttacttttattctcgcttttatgaccgtaatgggaatgacaatagctttcgcgaaagacatttcagatatcgaaggtgatgcgaaatatggggtgtctactgttgctacgaagttaggtgcaagaaatatgacgagagttgtcagtggtgtcttgttgctgacatacgtaagcgctatacttgcagctatcatttggccgcaagcctttaagtcaaatgtgatgttgttatctcatgccatcctggcgttctgcctaattttccaaactagagagctagcgcttgcaaattatgcttctgcacctagtaggcagttttttgaatttatctggaaattgcattatgcagagtacttagtttatgttttcatc

SEQ ID NO: 898 - DNA, 969 bp, Artificial Sequence
  Synthetic
atgtcagccgggagcgaccagatagaaggaagtcctcatcacgagtctgataactccattgcgacaaaaatcctgaatttcggtcatacgttttggaagttacaaaggccctatgtcgtgaaaggtatgatttcgatagcttgtggcttgtttggtcgcgaactatttcataataccaaccttttatcttggtcattgatgctcaaggcattctcatccttaatggtaatcctttcttttaatttctttgctgccgttatgaatcaaatttacgatgttgaaattgaccgaattaacaaaccagatttgccactcgttagtggagagatgagtatcgaaactgcatggatactatcgatcattgtcgctctgacaggcttaatattgactattaagcttaattgtggtccgctatttatatcattgtattgcgtatctctgttcgctggatttgcatacagcgttcctccaattcgttggaaacagtatcctttcaccaacttcttaataactatcagctcacacgtgggtgttaactttacatgttattacgcctccagagcagcctttggcttacccttcgaaatgtctccgccatttacttttattctcgcttttatgaccgtaatgggaatgacaatagctttcgcgaaagacatttcagatatcgaaggtgatgcgaaatatggggtgtctactgttgctacgaagttaggtgcaagaaatatgacgtttgttgtcagtggtgtcttgttgctgacatacgtaagcgctatacttgcagctatcatttggccgcaagcctttaagtcaaatgtgatgttgttatctcatgccatcctggcgttctgcctaattttccaaactagagagctagcgcttgcaaattatgcttctgcacctagtaggcagttttttgaatttatctggaaattgcattatgcagagtacttagtttatgttttcatc

SEQ ID NO: 899 - DNA, 969 bp, Artificial Sequence
  Synthetic
atgtccgcaggatcagatcaaatagaagggagcccccatcacgagtcggacaacagtatcgcgacaaaaattcttaattttggccatactttctggaagttacagcgtccttacgtagttaaaggtatgatttcttgcgcttgcggtttgttcggtaaggaactactccacaatacgaacttgatatcatggtctttaatgtttaaagccttctttgctctggtcccaattctaagtttcaattttttcgcagccgctatgaatcaaatctatgatgttgacatagataggattaacaagccggatttaccactcgtgtccggagaaatgtctataagaacagcttggatcctgtcgattattgtcgctcttactggcttgatagttaccattaaaatgaaaggtggccctttatttgtgtttatctatatatttggtctattcgcaggttttgcttactctgtacctccaattcgatggaagcagtatccgttcactaactttttgatcaccatttcaagccatgttggactagccttcacatcctactatgcttctagagccgcgcttggtctaccatttgaactgcgcccctcatttagttttataattgcattcatgacagttatggggatgactattgcctttgcaaaggacatttcagatattgaaggagatgcaaaatatggtgtctctacggtagctactaaattaggtgctagaaatatgacctgggttgtgtcgggggtgttgctattaaattacttagtcagtattttggcaggaataatctggcccttcgcttttaattcaaatgtcatgatcttatcgcacgcaattttggccttctgtctcatctttaggacgagagaattagcccttgctaactacgcaagtgctccttcccgtcaatttttcgagtttatttggaacctgtattatgcggaatacctggtatacgttttcatt

SEQ ID NO: 900 - DNA, 969 bp, Artificial Sequence
  Synthetic
atgtcagccgggagcgaccagatagaaggaagtcctcatcacgagtctgataactccattgcgacaaaaatcctgaatttcggtcatacgtgctggaagttacaaaggccctatgtcgtgaaaggtatgatttcgatagcttgtggcttgtttggtcgcgaactatttcataataccaaccttttatcttggtcattgatgctcaaggcattctcatccttaatggtaatcctttcttttaatttctttgctgccgcaattaatcaaatttacgatgttgatattgaccgaattaacaaaccagatttgccactcgttagtggagagatgagtatcgaaactgcatggatactatcgatcattgtcgctctgacaggcttaatattgactattaagcttaattgtggtccgctatttatatcattgtattgcgtatctattttcgctggatttgcatacagcgttcctccaattcgttggaaacagtatcctttcaccaacttcttaataactatcagctcacacgtgggtgttaactttacatgttattacgcctccagagcagcctttggcttacccttcgaaatgtctccgccatttacttttattctcgcttttatgaccgtaatgggaatgacaatagctttcgcgaaagacatttcagatatcgaaggtgatgcgaaatatggggtgtctactgttgctacgaagttaggtgcaagaaatatgacgtttgttgtcagtggtgtcttgttgctgacatacgtaagcgctatacttgcagctatcatttggccgcaagcctttaagtcaaatgtgatgttgttatctcatgccatcctggcgttctgcctaattttccaaactagagagctagcgcttgcaaattatgcttctgcacctagtaggcagttttttgaatttatctggaaattgcattatgcagagtacttagtttatgttttcatc

SEQ ID NO: 901 - DNA, 969 bp, Artificial Sequence
  Synthetic
atgtccgcaggatcagatcaaatagaagggagcccccatcacgagtcggacaacagtatcgcgacaaaaattcttaattttggccatactttctggaagttacagcgtccttacgtagttaaaggtctgatttctatcgcttgcggtttgttcggtaaggaactactccacaatacgaacttgatatcatggtctttaatgtttaaagccttctttgctctggtcccaattctaagtttcaattttttcgcagccgctatgaatcaaatctatgatgttgaaatagataggattaacaagccggatttaccactcgtgtccggagaaatgtctatacgcacagcttggatcctgtcgattattgtcgctcttactggcttgatagttaccattaaaatgaaaggtggccctttatttgtgtttatctatataagtggtatattcgcaggttttgcttactctgtacctccaattcgatggaagcagtatccgttcactaactttttgatcaccatttcaagccatgttggactagccttcacatcctactatgcttctagagccgcgcttggtctaccatttgaactgcgcccctcatttagttttataattgcattcatgacagttatggggatgactattgcctttgcaaaggacatttcagatattgaaggagatgcaaaatatggtgtctctacggtagctactaaattaggtgctagaaatatgacccgggttgtgtcgggggtgttgctattaaattacttagtcagtattttggcaggaataatctggccctttgcttttaattcaaatgtcatgatcttatcgcacgcaattttggccttctgtctcatctttcaaacgagagaattagcccttgctaactacgcaagtgctccttcccgtcaatttttcgagtttatttggaagctgtattatgcggaatacctggtatacgttttcatt

SEQ ID NO: 902 - DNA, 969 bp, Artificial Sequence
  Synthetic
atgtccgcaggatcagatcaaatagaagggagcccccatcacgagtcggacaacagtatcgcgacaaaaattcttaattttggccatactttctggaagttacagcgtccttacgtagttaaaggtctgatttctatcgcttgcggtttgttcggtaaggaactactccacaatacgaacttgatatcatggtctttaatgtttaaagccttctttgctctggtcccaattctaagtttcaattttttcgcagccggaatgaatcaaatctatgatgttgagatagataggattaacaagccggatttaccactcgtgtccggagaaatgtctataagaacagcttggatcctgtcgattattgtcgctcttactggcttgatagttaccattaaaatgaaaggtggccctttatttgtgtttatctatatacttggtatattcgcaggttttgcttactctgtacctccaattcgatggaagcagtatccgttcactaactttttgatcaccatttcaagccatgttggactagccttcacatcctactatgcttctagagccgcgcttggtctaccatttgaactgcgcccctcatttagttttataattgcattcatgacagttatggggatgactattgcctttgcaaaggacatttcagatattgaaggagatgcaaaatatggtgtctctacggtagctactaaattaggtgctagaaatatgaccagggttgtgtcgggggtgttgctattaaattacttagtcagtattttggcaggaataatctggccccaagcttttaattcaaatgtcatgatcttatcgcacgcaattttggccttctgtctcatctttagaacgagagaattagcccttgctaactacgcaagtgctccttcccgtcaatttttcgagtttatttggaggctgtattatgcggaatacctggtatacgttttcatt

SEQ ID NO: 903 - DNA, 969 bp, Artificial Sequence
  Synthetic
atgtcagccgggagcgaccagatagaaggaagtcctcatcacgagtctgataactccattgcgacaaaaatcctgaatttcggtcatacgtgctggaagttacaaaggccctatgtcgtgaaaggtttgatttcgatagcttgtggcttgtttggtcgcgaactatttcataataccaaccttttatcttggtcattgatgctcaaggcattctcatccttaatggtaatcctttcttttaatttctttgctgccgcaatgaatcaaatttacgatgttgaaattgaccgaattaacaaaccagatttgccactcgttagtggagagatgagtatcgaaactgcatggatactatcgatcattgtcgctctgacaggcttaatattgactattaagcttaattgtggtccgctatttatatcattgtattgcgtatctattttcgctggatttgcatacagcgttcctccaattcgttggaaacagtatcctttcaccaacttcttaataactatcagctcacacgtgggtgttaactttacatgttattacgcctccagagcagcctttggcttacccttcgaaatgtctccgccatttacttttattctcgcttttatgaccgtaatgggaatgacaatagctttcgcgaaagacatttcagatatcgaaggtgatgcgaaatatggggtgtctactgttgctacgaagttaggtgcaagaaatatgacgtttgttgtcagtggtgtcttgttgctgacatacgtaagcgctatacttgcagctatcatttggccgcaagcctttaagtcaaatgtgatgttgttatctcatgccatcctggcgttctgcctaattttccaaactagagagctagcgcttgcaaattatgcttctgcacctagtaggcagttttttgaatttatctggaaattgcattatgcagagtacttagtttatgttttcatc

SEQ ID NO: 904 - DNA, 969 bp, Artificial Sequence
  Synthetic
atgtccgcaggatcagatcaaatagaagggagcccccatcacgagtcggacaacagtatcgcgacaaaaattcttaattttggccatactttctggaagttacagcgtccttacgtagttaaaggtatgatttcttgtgcttgcggtttgttcggtaaggaactactccacaatacgaacttgatatcatggtctttaatgtttaaagccttctttgctctggtcccaattctaagtttcaattttttcgcagccgggatgaatcaaatctatgatgttgaaatagataggattaacaagccggatttaccactcgtgtccggagaaatgtctatacgcacagcttggatcctgtcgattattgtcgctcttactggcttgatagttaccattaaaatgaaaggtggccctttatttgtgtttatctatatattgggtatattcgcaggttttgcttactctgtacctccaattcgatggaagcagtatccgttcactaactttttgatcaccatttcaagccatgttggactagccttcacatcctactatgcttctagagccgcgcttggtctaccatttgaactgcgcccctcatttagttttataattgcattcatgacagttatggggatgactattgcctttgcaaaggacatttcagatattgaaggagatgcaaaatatggtgtctctacggtagctactaaattaggtgctagaaatatgaccagggttgtgtcgggggtgttgctattaaattacttagtcagtattttggcaggaataatctggccccaagcttttaattcaaatgtcatgatcttatcgcacgcaattttggccttctgtctcatctttagaacgagagaattagcccttgctaactacgcaagtgctccttcccgtcaatttttcgagtttatttggaacctgtattatgcggaatacctggtatacgttttcatt

SEQ ID NO: 905 - DNA, 969 bp, Artificial Sequence
  Synthetic
atgtccgcaggatcagatcaaatagaagggagcccccatcacgagtcggacaacagtatcgcgacaaaaattcttaattttggccatactttctggaagttacagcgtccttacgtagttaaaggtgtgatttctatcgcttgcggtttgttcggtaaggaactactccacaatacgaacttgatatcatggtctttaatgtttaaagccttctttgctctggtcccaattctaagtttcaattttttcgcagccggaatgaatcaaatctatgatgttgacatagataggattaacaagccggatttaccactcgtgtccggagaaatgtctataagaacagcttggatcctgtcgattattgtcgctcttactggcttgatagttaccattaaaatgaaaggtggccctttatttgtgtttatctatatattgggtatattcgcaggttttgcttactctgtacctccaattcgatggaagcagtatccgttcactaactttttgatcaccatttcaagccatgttggactagccttcacatcctactatgcttctagagccgcgcttggtctaccatttgaactgcgcccctcatttagttttataattgcattcatgacagttatggggatgactattgcctttgcaaaggacatttcagatattgaaggagatgcaaaatatggtgtctctacggtagctactaaattaggtgctagaaatatgaccagggttgtgtcgggggtgttgctattaaattacttagtcagtattttggcaggaataatctggccctttgcttttaattcaaatgtcatgatcttatcgcacgcaattttggccttctgtctcatctttagaacgagagaattagcccttgctaactacgcaagtgctccttcccgtcaatttttcgagtttatttggaaactgtattatgcggaatacctggtatacgttttcatt

SEQ ID NO: 906 - DNA, 969 bp, Artificial Sequence
  Synthetic
atgtccgcaggatcagatcaaatagaagggagcccccatcacgagtcggacaacagtatcgcgacaaaaattcttaattttggccatactttctggaagttacagcgtccttacgtagttaaaggtatgatttctatcgcttgcggtttgttcggtaaggaactactccacaatacgaacttgatatcatggtctttaatgtttaaagccttctttgctctggtcccaattctaagtttcaatggattcgcagccgttgtgaatcaaatctatgatgttgagatagataggattaacaagccggatttaccactcgtgtccggagaaatgtctatagagacagcttggatcctgtcgattattgtcgctcttactggcttgatagttaccattaaaatgaaaggtggccctttatttgtgtttatctatatactgggtttgttcgcaggttttgcttactctgtacctccaattcgatggaagcagtatccgttcactaactttttgatcaccatttcaagccatgttggactagccttcacatcctactatgcttctagagccgcgcttggtctaccatttgaactgcgcccctcatttagttttataattgcattcatgacagttatggggatgactattgcctttgcaaaggacatttcagatattgaaggagatgcaaaatatggtgtctctacggtagctactaaattaggtgctagaaatatgaccagagttgtgtcgggggtgttgctattaaattacttagtcagtattttggcaggaataatctggccccaagcttttaattcaaatgtcatgatcttatcgcacgcaattttggccttctgtctcatctttcaaacgagagaattagcccttgctaactacgcaagtgctccttcccgtcaatttttcgagtttatttggaaactgtattatgcggaatacctggtatacgttttcatt

SEQ ID NO: 907 - DNA, 969 bp, Artificial Sequence
  Synthetic
atgtcagccgggagcgaccagatagaaggaagtcctcatcacgagtctgataactccattgcgacaaaaatcctgaatttcggtcatacgtgctggaagttacaaaggccctatgtcgtgaaaggtatgatttcgatagcttgtggcttgtttggtcgcgaactatttcataataccaaccttttatcttggtcattgatgctcaaggcattctcatccttaatggtaatcctttcttttaatttctttgctgccgcaatgaatcaaatttacgatgttgaaattgaccgaattaacaaaccagatttgccactcgttagtggagagatgagtatcgaaactgcatggatactatcgatcattgtcgctctgacaggcttaatattgactattaagcttaattgtggtccgctatttatatcattgtattgcgtatctttattcgctggatttgcatacagcgttcctccaattcgttggaaacagtatcctttcaccaacttcttaataactatcagctcacacgtgggtgttaactttacatgttattacgcctccagagcagcctttggcttacccttcgaaatgtctccgccatttacttttattctcgcttttatgaccgtaatgggaatgacaatagctttcgcgaaagacatttcagatatcgaaggtgatgcgaaatatggggtgtctactgttgctacgaagttaggtgcaagaaatatgacgtttgttgtcagtggtgtcttgttgctgacatacgtaagcgctatacttgcagctatcatttggccgcaagcctttaagtcaaatgtgatgttgttatctcatgccatcctggcgttctgcctaattttccaaactagagagctagcgcttgcaaattatgcttctgcacctagtaggcagttttttgaatttatctggaaattgcattatgcagagtacttagtttatgttttcatc

SEQ ID NO: 908 - DNA, 969 bp, Artificial Sequence
  Synthetic
atgtcagccgggagcgaccagatagaaggaagtcctcatcacgagtctgataactccattgcgacaaaaatcctgaatttcggtcatacgtgctggaagttacaaaggccctatgtcgtgaaaggtatgatttcgatagcttgtggcttgtttggtcgcgaactatttcataataccaaccttttatcttggtcattgatgctcaaggcattctcatccttaatggtaatcctttcttttaatttctttgctgccgcaatgaatcaaatttacgatgttgagattgaccgaattaacaaaccagatttgccactcgttagtggagagatgagtatcgaaactgcatggatactatcgatcattgtcgctctgacaggcttaatattgactattaagcttaattgtggtccgctatttatatcattgtattgcgtatctattttcgctggatttgcatacagcgttcctccaattcgttggaaacagtatcctttcaccaacttcttaataactatcagctcacacgtgggtgttaactttacatgttattacgcctccagagcagcctttggcttacccttcgaaatgtctccgccatttacttttattctcgcttttatgaccgtaatgggaatgacaatagctttcgcgaaagacatttcagatatcgaaggtgatgcgaaatatggggtgtctactgttgctacgaagttaggtgcaagaaatatgacgtttgttgtcagtggtgtcttgttgctgacatacgtaagcgctatacttgcagctatcatttggccgcaagcctttaagtcaaatgtgatgttgttatctcatgccatcctggcgttctgcctaattttccaaactagagagctagcgcttgcaaattatgcttctgcacctagtaggcagttttttgaatttatctggaaattgcattatgcagagtacttagtttatgttttcatc

SEQ ID NO: 909 - DNA, 969 bp, Artificial Sequence
  Synthetic
atgtcagccgggagcgaccagatagaaggaagtcctcatcacgagtctgataactccattgcgacaaaaatcctgaatttcggtcatacgtgctggaagttacaaaggccctatgtcgtgaaaggtatgatttcgatagcttgtggcttgtttggtcgcgaactatttcataataccaaccttttatcttggtcattgatgctcaaggcattctcatccttaatggtaatcctttcttttaatttctacgctgccgcaattaatcaaatttacgatgttgatattgaccgaattaacaaaccagatttgccactcgttagtggagagatgagtatcgaaactgcatggatactatcgatcattgtcgctctgacaggcttaatattgactattaagcttaattgtggtccgctatttatatcattgtattgcgtatctattttcgctggaactgcatacagcgttcctccaattcgttggaaacagtatcctttcaccaacttcttaataactatcagctcacacgtgggtgttaactttacatgttattacgcctccagagcagcctttggcttacccttcgaaatgtctccgccatttacttttattctcgcttttatgaccgtaatgggaatgacaatagctttcgcgaaagacatttcagatatcgaaggtgatgcgaaatatggggtgtctactgttgctacgaagttaggtgcaagaaatatgacgtttgttgtcagtggtgtcttgttgctgacatacgtaagcgctatacttgcagctatcatttggccgcaagcctttaagtcaaatgtgatgttgttatctcatgccatcctggcgttctgcctaattttccaaactagagagctagcgcttgcaaattatgcttctgcacctagtaggcagttttttgaatttatctggaaattgcattatgcagagtacttagtttatgttttcatc

SEQ ID NO: 910 - DNA, 969 bp, Artificial Sequence
  Synthetic
atgtcagccgggagcgaccagatagaaggaagtcctcatcacgagtctgataactccattgcgacaaaaatcctgaatttcggtcatacgtgctggaagttacaaaggccctatgtcgtgaaaggtatgatttcgatagcttgtggcttgtttggtcgcgaactatttcataataccaaccttttatcttggtcattgatgctcaaggcattctcatccttaatggtaatcctttcttttaatttctttgctgccgcagttaatcaaatttacgatgttgatattgaccgaattaacaaaccagatttgccactcgttagtggagagatgagtatcgaaactgcatggatactagctatcattgtcgctctgacaggcttaatattgactattaagcttaattgtggtccgctatttatatcattgtattgcgtatctattttcgctggaggtgcatacagcgttcctccaattcgttggaaacagtatcctttcaccaacttcttaataactatcagctcacacgtgggtgttaactttacatgttattacgcctccagagcagcctttggcttacccttcgaaatgtctccgccatttacttttattctcgcttttatgaccgtaatgggaatgacaatagctttcgcgaaagacatttcagatatcgaaggtgatgcgaaatatggggtgtctactgttgctacgaagttaggtgcaagaaatatgacgtttgttgtcagtggtgtcttgttgctgacatacgtaagcgctatacttgcagctatcatttggccgcaagcctttaagtcaaatgtgatgttgttatctcatgccatcctggcgttctgcctaattttccaaactagagagctagcgcttgcaaattatgcttctgcacctagtaggcagttttttgaatttatctggaaattgcattatgcagagtacttagtttatgttttcatc

SEQ ID NO: 911 - DNA, 969 bp, Artificial Sequence
  Synthetic
atgtcagccgggagcgaccagatagaaggaagtcctcatcacgagtctgataactccattgcgacaaaaatcctgaatttcggtcatacgtgctggaagttacaaaggccctatgtcgtgaaaggtatgatttcgatagcttgtggcttgtttggtcgcgaactatttcataataccaaccttttatcttggtcattgatgctcaaggcattctcatccttaatggtaatcctttcttttaatttctttgctgccgcaatgaatcaaatttacgatgttgatattgaccgaattaacaaaccagatttgccactcgttagtggagagatgagtatcgaaactgcatggatactagctatcattgtcgctctgacaggcttaatattgactattaagcttaattgtggtccgctatttatatcattgtattgcgtatctattttcgctggatttgcatacagcgttcctccaattcgttggaaacagtatcctttcaccaacttcttaataactatcagctcacacgtgggtgttaactttacatgttattacgcctccagagcagcctttggcttacccttcgaaatgtctccgccatttacttttattctcgcttttatgaccgtaatgggaatgacaatagctttcgcgaaagacatttcagatatcgaaggtgatgcgaaatatggggtgtctactgttgctacgaagttaggtgcaagaaatatgacgtttgttgtcagtggtgtcttgttgctgacatacgtaagcgctatacttgcagctatcatttggccgcaagcctttaagtcaaatgtgatgttgttatctcatgccatcctggcgttctgcctaattttccaaactagagagctagcgcttgcaaattatgcttctgcacctagtaggcagttttttgaatttatctggaaattgcattatgcagagtacttagtttatgttttcatc

SEQ ID NO: 912 - DNA, 969 bp, Artificial Sequence
  Synthetic
atgtcagccgggagcgaccagatagaaggaagtcctcatcacgagtctgataactccattgcgacaaaaatcctgaatttcggtcatacgtgctggaagttacaaaggccctatgtcgtgaaaggtttgatttcgatagcttgtggcttgtttggtcgcgaactatttcataataccaaccttttatcttggtcattgatgctcaaggcattctcatccttaatggtaatcctttcttttaatttctttgctgccagtgttaatcaaatttacgatgttgatattgaccgaattaacaaaccagatttgccactcgttagtggagagatgagtatcgaaactgcatggatactatcgatcattgtcgctctgacaggcttaatattgactattaagcttaattgtggtccgctatttatatcattgtattgcgtatctattttcgctggatttgcatacagcgttcctccaattcgttggaaacagtatcctttcaccaacttcttaataactatcagctcacacgtgggtgttaactttacatgttattacgcctccagagcagcctttggcttacccttcgaaatgtctccgccatttacttttattctcgcttttatgaccgtaatgggaatgacaatagctttcgcgaaagacatttcagatatcgaaggtgatgcgaaatatggggtgtctactgttgctacgaagttaggtgcaagaaatatgacgtttgttgtcagtggtgtcttgttgctgacatacgtaagcgctatacttgcagctatcatttggccgcaagcctttaagtcaaatgtgatgttgttatctcatgccatcctggcgttctgcctaattttccaaactagagagctagcgcttgcaaattatgcttctgcacctagtaggcagttttttgaatttatctggaaattgcattatgcagagtacttagtttatgttttcatc

SEQ ID NO: 913 - DNA, 969 bp, Artificial Sequence
  Synthetic
atgtcagccgggagcgaccagatagaaggaagtcctcatcacgagtctgataactccattgcgacaaaaatcctgaatttcggtcatacgtgctggaagttacaaaggccctatgtcgtgaaaggtatgatttcgatagcttgtggcttgtttggtcgcgaactatttcataataccaaccttttatcttggtcattgatgctcaaggcattctcatccttaatggtaatcctttcttttaatttctttgctgccactatgaatcaaatttacgatgttgatattgaccgaattaacaaaccagatttgccactcgttagtggagagatgagtatcgaaactgcatggatactagctatcattgtcgctctgacaggcttaatattgactattaagcttaattgtggtccgctatttatatcattgtattgcgtatctattttcgctggaaccgcatacagcgttcctccaattcgttggaaacagtatcctttcaccaacttcttaataactatcagctcacacgtgggtgttaactttacatgttattacgcctccagagcagcctttggcttacccttcgaaatgtctccgccatttacttttattctcgcttttatgaccgtaatgggaatgacaatagctttcgcgaaagacatttcagatatcgaaggtgatgcgaaatatggggtgtctactgttgctacgaagttaggtgcaagaaatatgacgtttgttgtcagtggtgtcttgttgctgacatacgtaagcgctatacttgcagctatcatttggccgcaagcctttaagtcaaatgtgatgttgttatctcatgccatcctggcgttctgcctaattttccaaactagagagctagcgcttgcaaattatgcttctgcacctagtaggcagttttttgaatttatctggaaattgcattatgcagagtacttagtttatgttttcatc

SEQ ID NO: 914 - DNA, 969 bp, Artificial Sequence
  Synthetic
atgtcagccgggagcgaccagatagaaggaagtcctcatcacgagtctgataactccattgcgacaaaaatcctgaatttcggtcatacgttttggaagttacaaaggccctatgtcgtgaaaggtatgatttcgatagcttgtggcttgtttggtcgcgaactatttcataataccaaccttttatcttggtcattgatgctcaaggcattctcatccttaatggtaatcctttcttttaatggatttgctgccataatgaatcaaatttacgatgttgatattgaccgaattaacaaaccagatttgccactcgttagtggagagatgagtatcgaaactgcatggatactatcgatcattgtcgctctgacaggcttaatattgactattaagcttaattgtggtccgctatttatatcattgtattgcgtatctattttcgctggatttgcatacagcgttcctccaattcgttggaaacagtatcctttcaccaacttcttaataactatcagctcacacgtgggtgttaactttacatgttattacgcctccagagcagcctttggcttacccttcgaaatgtctccgccatttacttttattctcgcttttatgaccgtaatgggaatgacaatagctttcgcgaaagacatttcagatatcgaaggtgatgcgaaatatggggtgtctactgttgctacgaagttaggtgcaagaaatatgacgtttgttgtcagtggtgtcttgttgctgacatacgtaagcgctatacttgcagctatcatttggccgcaagcctttaagtcaaatgtgatgttgttatctcatgccatcctggcgttctgcctaattttccaaactagagagctagcgcttgcaaattatgcttctgcacctagtaggcagttttttgaatttatctggaaattgcattatgcagagtacttagtttatgttttcatc

SEQ ID NO: 915 - DNA, 969 bp, Artificial Sequence
  Synthetic
atgtcagccgggagcgaccagatagaaggaagtcctcatcacgagtctgataactccattgcgacaaaaatcctgaatttcggtcatacgttttggaagttacaaaggccctatgtcgtgaaaggtttgatttcgatagcttgtggcttgtttggtcgcgaactatttcataataccaaccttttatcttggtcattgatgctcaaggcattctcatccttaatggtaatcctttcttttaatttctttgctgccgcaatgaatcaaatttacgatgttgagattgaccgaattaacaaaccagatttgccactcgttagtggagagatgagtatcgaaactgcatggatactatcgatcattgtcgctctgacaggcttaatattgactattaagcttaattgtggtccgctatttatatcattgtattgcgtatctattttcgctggatttgcatacagcgttcctccaattcgttggaaacagtatcctttcaccaacttcttaataactatcagctcacacgtgggtgttaactttacatgttattacgcctccagagcagcctttggcttacccttcgaaatgtctccgccatttacttttattctcgcttttatgaccgtaatgggaatgacaatagctttcgcgaaagacatttcagatatcgaaggtgatgcgaaatatggggtgtctactgttgctacgaagttaggtgcaagaaatatgacgtttgttgtcagtggtgtcttgttgctgacatacgtaagcgctatacttgcagctatcatttggccgcaagcctttaagtcaaatgtgatgttgttatctcatgccatcctggcgttctgcctaattttccaaactagagagctagcgcttgcaaattatgcttctgcacctagtaggcagttttttgaatttatctggaaattgcattatgcagagtacttagtttatgttttcatc

SEQ ID NO: 916 - DNA, 969 bp, Artificial Sequence
  Synthetic
atgtcagccgggagcgaccagatagaaggaagtcctcatcacgagtctgataactccattgcgacaaaaatcctgaatttcggtcatacgttttggaagttacaaaggccctatgtcgtgaaaggtatgatttcgatagcttgtggcttgtttggtcgcgaactatttcataataccaaccttttatcttggtcattgatgctcaaggcattctcatccttaatggtaatcctttcttttaatttctttgctgccgttatgaatcaaatttacgatgttgagattgaccgaattaacaaaccagatttgccactcgttagtggagagatgagtatcgaaactgcatggatactatcgatcattgtcgctctgacaggcttaatattgactattaagcttaattgtggtccgctatttatatcattgtattgcgtatctattttcgctggatttgcatacagcgttcctccaattcgttggaaacagtatcctttcaccaacttcttaataactatcagctcacacgtgggtgttaactttacatgttattacgcctccagagcagcctttggcttacccttcgaaatgtctccgccatttacttttattctcgcttttatgaccgtaatgggaatgacaatagctttcgcgaaagacatttcagatatcgaaggtgatgcgaaatatggggtgtctactgttgctacgaagttaggtgcaagaaatatgacgtttgttgtcagtggtgtcttgttgctgacatacgtaagcgctatacttgcagctatcatttggccgcaagcctttaagtcaaatgtgatgttgttatctcatgccatcctggcgttctgcctaattttccaaactagagagctagcgcttgcaaattatgcttctgcacctagtaggcagttttttgaatttatctggaaattgcattatgcagagtacttagtttatgttttcatc

SEQ ID NO: 917 - DNA, 969 bp, Artificial Sequence
  Synthetic
atgtcagccgggagcgaccagatagaaggaagtcctcatcacgagtctgataactccattgcgacaaaaatcctgaatttcggtcatacgtgctggaagttacaaaggccctatgtcgtgaaaggtatgatttcgatagcttgtggcttgtttggtcgcgaactatttcataataccaaccttttatcttggtcattgatgctcaaggcattctcatccttaatggtaatcctttcttttaatttctttgctgccggaatgaatcaaatttacgatgttgatattgaccgaattaacaaaccagatttgccactcgttagtggagagatgagtatcgaaactgcatggatactatcgatcattgtcgctctgacaggcttaatattgactattaagcttaattgtggtccgctatttatatcattgtattgcgtatctattttcgctggatttgcatacagcgttcctccaattcgttggaaacagtatcctttcaccaacttcttaataactatcagctcacacgtgggtgttaactttacatgttattacgcctccagagcagcctttggcttacccttcgaaatgtctccgccatttacttttattctcgcttttatgaccgtaatgggaatgacaatagctttcgcgaaagacatttcagatatcgaaggtgatgcgaaatatggggtgtctactgttgctacgaagttaggtgcaagaaatatgacgcgtgttgtcagtggtgtcttgttgctgacatacgtaagcgctatacttgcagctatcatttggccgcaagcctttaagtcaaatgtgatgttgttatctcatgccatcctggcgttctgcctaattttccaaactagagagctagcgcttgcaaattatgcttctgcacctagtaggcagttttttgaatttatctggaaattgcattatgcagagtacttagtttatgttttcatc

SEQ ID NO: 918 - DNA, 969 bp, Artificial Sequence
  Synthetic
atgtcagccgggagcgaccagatagaaggaagtcctcatcacgagtctgataactccattgcgacaaaaatcctgaatttcggtcatacgtgctggaagttacaaaggccctatgtcgtgaaaggtcttatttcgatagcttgtggcttgtttggtcgcgaactatttcataataccaaccttttatcttggtcattgatgctcaaggcattctcatccttaatggtaatcctttcttttaatttctttgctgcctcgatgaatcaaatttacgatgttgatattgaccgaattaacaaaccagatttgccactcgttagtggagagatgagtatcgaaactgcatggatactatcgatcattgtcgctctgacaggcttaatattgactattaagcttaattgtggtccgctatttatatcattgtattgcgtatctattttcgctggatttgcatacagcgttcctccaattcgttggaaacagtatcctttcaccaacttcttaataactatcagctcacacgtgggtgttaactttacatgttattacgcctccagagcagcctttggcttacccttcgaaatgtctccgccatttacttttattctcgcttttatgaccgtaatgggaatgacaatagctttcgcgaaagacatttcagatatcgaaggtgatgcgaaatatggggtgtctactgttgctacgaagttaggtgcaagaaatatgacgagagttgtcagtggtgtcttgttgctgacatacgtaagcgctatacttgcagctatcatttggccgcaagcctttaagtcaaatgtgatgttgttatctcatgccatcctggcgttctgcctaattttccaaactagagagctagcgcttgcaaattatgcttctgcacctagtaggcagttttttgaatttatctggaaattgcattatgcagagtacttagtttatgttttcatc

SEQ ID NO: 919 - DNA, 969 bp, Artificial Sequence
  Synthetic
atgtcagccgggagcgaccagatagaaggaagtcctcatcacgagtctgataactccattgcgacaaaaatcctgaatttcggtcatacgtgctggaagttacaaaggccctatgtcgtgaaaggtatgatttcgatagcttgtggcttgtttggtcgcgaactatttcataataccaaccttttatcttggtcattgatgctcaaggcattctcatccttaatggtaatcctttcttttaatttctttgctgccactactaatcaaatttacgatgttgatattgaccgaattaacaaaccagatttgccactcgttagtggagagatgagtatcgaaactgcatggatactatcgatcattgtcgctctgacaggcttaatattgactattaagcttaattgtggtccgctatttatatcattgtattgcgtatctattttcgctggatttgcatacagcgttcctccaattcgttggaaacagtatcctttcaccaacttcttaataactatcagctcacacgtgggtgttaactttacatgttattacgcctccagagcagcctttggcttacccttcgaaatgtctccgccatttacttttattctcgcttttatgaccgtaatgggaatgacaatagctttcgcgaaagacatttcagatatcgaaggtgatgcgaaatatggggtgtctactgttgctacgaagttaggtgcaagaaatatgacgtttgttgtcagtggtgtcttgttgctgacatacgtaagcgctatacttgcagctatcatttggccgcaagcctttaagtcaaatgtgatgttgttatctcatgccatcctggcgttctgcctaattttccaaactagagagctagcgcttgcaaattatgcttctgcacctagtaggcagttttttgaatttatctggaaattgcattatgcagagtacttagtttatgttttcatc

SEQ ID NO: 920 - DNA, 969 bp, Artificial Sequence
  Synthetic
atgtccgcaggatcagatcaaatagaagggagcccccatcacgagtcggacaacagtatcgcgacaaaaattcttaattttggccatactttctggaagttacagcgtccttacgtagttaaaggtctgatttctatcgcttgcggtttgttcggtaaggaactactccacaatacgaacttgatatcatggtctttaatgtttaaagccttctttgctctggtcccaattctaagtttcaattttttcgcagccgcgatgaatcaaatctatgatgttgaaatagataggattaacaagccggatttaccactcgtgtccggagaaatgtctataagaacagcttggatcctgtcgattattgtcgctcttactggcttgatagttaccattaaaatgaaaggtggccctttatttgtgtttatctatatatttggtctattcgcaggttttgcttactctgtacctccaattcgatggaagcagtatccgttcactaactttttgatcaccatttcaagccatgttggactagccttcacatcctactatgcttctagagccgcgcttggtctaccatttgaactgcgcccctcatttagttttataattgcattcatgacagttatggggatgactattgcctttgcaaaggacatttcagatattgaaggagatgcaaaatatggtgtctctacggtagctactaaattaggtgctagaaatatgacccgggttgtgtcgggggtgttgctattaaattacttagtcagtattttggcaggaataatctggccctttgcttttaattcaaatgtcatgatcttatcgcacgcaattttggccttctgtctcatctttagaacgagagaattagcccttgctaactacgcaagtgctccttcccgtcaatttttcgagtttatttggttgctgtattatgcggaatacctggtatacgttttcatt

SEQ ID NO: 921 - DNA, 969 bp, Artificial Sequence
  Synthetic
atgtccgcaggatcagatcaaatagaagggagcccccatcacgagtcggacaacagtatcgcgacaaaaattcttaattttggccatactttctggaagttacagcgtccttacgtagttaaaggtctaatttctatcgcttgcggtttgttcggtaaggaactactccacaatacgaacttgatatcatggtctttaatgtttaaagccttctttgctctggtcccaattctaagtttcaattttttcgcagccgttgtgaatcaaatctatgatgttgaaatagataggattaacaagccggatttaccactcgtgtccggagaaatgtctatagagacagcttggatcctgtcgattattgtcgctcttactggcttgatagttaccattaaaatgaaaggtggccctttatttgtgtttatctatatattgggtttgttcgcaggttttgcttactctgtacctccaattcgatggaagcagtatccgttcactaactttttgatcaccatttcaagccatgttggactagccttcacatcctactatgcttctagagccgcgcttggtctaccatttgaactgcgcccctcatttagttttataattgcattcatgacagttatggggatgactattgcctttgcaaaggacatttcagatattgaaggagatgcaaaatatggtgtctctacggtagctactaaattaggtgctagaaatatgaccagagttgtgtcgggggtgttgctattaaattacttagtcagtattttggcaggaataatctggccccaagcttttaattcaaatgtcatgatcttatcgcacgcaattttggccttctgtctcatctttcaaacgagagaattagcccttgctaactacgcaagtgctccttcccgtcaatttttcgagtttatttggaacctgtattatgcggaatacctggtatacgttttcatt

SEQ ID NO: 922 - DNA, 969 bp, Artificial Sequence
  Synthetic
atgtccgcaggatcagatcaaatagaagggagcccccatcacgagtcggacaacagtatcgcgacaaaaattcttaattttggccatactttctggaagttacagcgtccttacgtagttaaaggtctgatttctatcgcttgcggtttgttcggtaaggaactactccacaatacgaacttgatatcatggtctttaatgtttaaagccttctttgctctggtcccaattctaagtttcaattttttcgcagcctcggtgaatcaaatctatgatgttgaaatagataggattaacaagccggatttaccactcgtgtccggagaaatgtctatagagacagcttggatcctgtcgattattgtcgctcttactggcttgatagttaccattaaaatgaaaggtggccctttatttgtgtttatctatatattaggtttgttcgcaggttttgcttactctgtacctccaattcgatggaagcagtatccgttcactaactttttgatcaccatttcaagccatgttggactagccttcacatcctactatgcttctagagccgcgcttggtctaccatttgaactgcgcccctcatttagttttataattgcattcatgacagttatggggatgactattgcctttgcaaaggacatttcagatattgaaggagatgcaaaatatggtgtctctacggtagctactaaattaggtgctagaaatatgaccagagttgtgtcgggggtgttgctattaaattacttagtcagtattttggcaggaataatctggccccaagcttttaattcaaatgtcatgatcttatcgcacgcaattttggccttctgtctcatctttcaaacgagagaattagcccttgctaactacgcaagtgctccttcccgtcaatttttcgagtttatttggaaactgtattatgcggaatacctggtatacgttttcatt

SEQ ID NO: 923 - DNA, 969 bp, Artificial Sequence
  Synthetic
atgtccgcaggatcagatcaaatagaagggagcccccatcacgagtcggacaacagtatcgcgacaaaaattcttaattttggccatactttctggaagttacagcgtccttacgtagttaaaggtatgatttcttgtgcttgcggtttgttcggtaaggaactactccacaatacgaacttgatatcatggtctttaatgtttaaagccttctttgctctggtcccaattctaagtttcaatggattcgcagccattatgaatcaaatctatgatgttgaaatagataggattaacaagccggatttaccactcgtgtccggagaaatgtctataagaacagcttggatcctgtcgattattgtcgctcttactggcttgatagttaccattaaaatgaaaggtggccctttatttgtgtttatctatatacttggtatattcgcaggttttgcttactctgtacctccaattcgatggaagcagtatccgttcactaactttttgatcaccatttcaagccatgttggactagccttcacatcctactatgcttctagagccgcgcttggtctaccatttgaactgcgcccctcatttagttttataattgcattcatgacagttatggggatgactattgcctttgcaaaggacatttcagatattgaaggagatgcaaaatatggtgtctctacggtagctactaaattaggtgctagaaatatgaccttcgttgtgtcgggggtgttgctattaaattacttagtcagtattttggcaggaataatctggccctttgcttttaattcaaatgtcatgatcttatcgcacgcaattttggccttctgtctcatctttaggacgagagaattagcccttgctaactacgcaagtgctccttcccgtcaatttttcgagtttatttggaatctgtattatgcggaatacctggtatacgttttcatt

SEQ ID NO: 924 - DNA, 969 bp, Artificial Sequence
  Synthetic
atgtcagccgggagcgaccagatagaaggaagtcctcatcacgagtctgataactccattgcgacaaaaatcctgaatttcggtcatacgtgctggaagttacaaaggccctatgtcgtgaaaggtatgatttcgatagcttgtggcttgtttggtcgcgaactatttcataataccaaccttttatcttggtcattgatgctcaaggcattctcatccttaatggtaatcctttcttttaatttctttgctgccggaatgaatcaaatttacgatgttgaaattgaccgaattaacaaaccagatttgccactcgttagtggagagatgagtatcgaaactgcatggatactatcgatcattgtcgctctgacaggcttaatattgactattaagcttaattgtggtccgctatttatatcattgtattgcgtatctattttcgctggatttgcatacagcgttcctccaattcgttggaaacagtatcctttcaccaacttcttaataactatcagctcacacgtgggtgttaactttacatgttattacgcctccagagcagcctttggcttacccttcgaaatgtctccgccatttacttttattctcgcttttatgaccgtaatgggaatgacaatagctttcgcgaaagacatttcagatatcgaaggtgatgcgaaatatggggtgtctactgttgctacgaagttaggtgcaagaaatatgacgtttgttgtcagtggtgtcttgttgctgacatacgtaagcgctatacttgcagctatcatttggccgcaagcctttaagtcaaatgtgatgttgttatctcatgccatcctggcgttctgcctaattttccaaactagagagctagcgcttgcaaattatgcttctgcacctagtaggcagttttttgaatttatctggaaattgcattatgcagagtacttagtttatgttttcatc

SEQ ID NO: 925 - DNA, 969 bp, Artificial Sequence
  Synthetic
atgtcagccgggagcgaccagatagaaggaagtcctcatcacgagtctgataactccattgcgacaaaaatcctgaatttcggtcatacgtgctggaagttacaaaggccctatgtcgtgaaaggtatgatttcgatagcttgtggcttgtttggtcgcgaactatttcataataccaaccttttatcttggtcattgatgctcaaggcattctcatccttaatggtaatcctttcttttaatggttttgctgccataatgaatcaaatttacgatgttgatattgaccgaattaacaaaccagatttgccactcgttagtggagagatgagtatcgaaactgcatggatactatcgatcattttcgctctgacaggcttaatattgactattaagcttaattgtggtccgctatttatatcattgtattgcgtatctattttcgctggatttgcatacagcgttcctccaattcgttggaaacagtatcctttcaccaacttcttaataactatcagctcacacgtgggtgttaactttacatgttattacgcctccagagcagcctttggcttacccttcgaaatgtctccgccatttacttttattctcgcttttatgaccgtaatgggaatgacaatagctttcgcgaaagacatttcagatatcgaaggtgatgcgaaatatggggtgtctactgttgctacgaagttaggtgcaagaaatatgacgtttgttgtcagtggtgtcttgttgctgacatacgtaagcgctatacttgcagctatcatttggccgcaagcctttaagtcaaatgtgatgttgttatctcatgccatcctggcgttctgcctaattttccaaactagagagctagcgcttgcaaattatgcttctgcacctagtaggcagttttttgaatttatctggaaattgcattatgcagagtacttagtttatgttttcatc

SEQ ID NO: 926 - DNA, 969 bp, Artificial Sequence
  Synthetic
atgtccgcaggatcagatcaaatagaagggagcccccatcacgagtcggacaacagtatcgcgacaaaaattcttaattttggccatactttctggaagttacagcgtccttacgtagttaaaggtctgatttctatcgcttgcggtttgttcggtaaggaactactccacaatacgaacttgatatcatggtctttaatgtttaaagccttctttgctctggtcccaattctaagtttcaatggcttcgcagccattatgaatcaaatctatgatgttgacatagataggattaacaagccggatttaccactcgtgtccggagaaatgtctatacgaacagcttggatcctgtcgattattgtcgctcttactggcttgatagttaccattaaaatgaaaggtggccctttatttgtgtttatctatatatccggtatattcgcaggttttgcttactctgtacctccaattcgatggaagcagtatccgttcactaactttttgatcaccatttcaagccatgttggactagccttcacatcctactatgcttctagagccgcgcttggtctaccatttgaactgcgcccctcatttagttttataattgcattcatgacagttatggggatgactattgcctttgcaaaggacatttcagatattgaaggagatgcaaaatatggtgtctctacggtagctactaaattaggtgctagaaatatgaccagggttgtgtcgggggtgttgctattaaattacttagtcagtattttggcaggaataatctggccctttgcttttaattcaaatgtcatgatcttatcgcacgcaattttggccttctgtctcatctttagaacgagagaattagcccttgctaactacgcaagtgctccttcccgtcaatttttcgagtttatttggagactgtattatgcggaatacctggtatacgttttcatt

SEQ ID NO: 927 - DNA, 969 bp, Artificial Sequence
  Synthetic
atgtccgcaggatcagatcaaatagaagggagcccccatcacgagtcggacaacagtatcgcgacaaaaattcttaattttggccatactttctggaagttacagcgtccttacgtagttaaaggtttgatttctatcgcttgcggtttgttcggtaaggaactactccacaatacgaacttgatatcatggtctttaatgtttaaagccttctttgctctggtcccaattctaagtttcaattttttcgcagcctctatgaatcaaatctatgatgttgaaatagataggattaacaagccggatttaccactcgtgtccggagaaatgtctatacgcacagcttggatcctgtcgattattgtcgctcttactggcttgatagttaccattaaaatgaaaggtggccctttatttgtgtttatctatatatttggtatattcgcaggttttgcttactctgtacctccaattcgatggaagcagtatccgttcactaactttttgatcaccatttcaagccatgttggactagccttcacatcctactatgcttctagagccgcgcttggtctaccatttgaactgcgcccctcatttagttttataattgcattcatgacagttatggggatgactattgcctttgcaaaggacatttcagatattgaaggagatgcaaaatatggtgtctctacggtagctactaaattaggtgctagaaatatgaccagagttgtgtcgggggtgttgctattaaattacttagtcagtattttggcaggaataatctggcccttcgcttttaattcaaatgtcatgatcttatcgcacgcaattttggccttctgtctcatctttcgtacgagagaattagcccttgctaactacgcaagtgctccttcccgtcaatttttcgagtttatttggaagctgtattatgcggaatacctggtatacgttttcatt

SEQ ID NO: 928 - DNA, 969 bp, Artificial Sequence
  Synthetic
atgtccgcaggatcagatcaaatagaagggagcccccatcacgagtcggacaacagtatcgcgacaaaaattcttaattttggccatactttctggaagttacagcgtccttacgtagttaaaggtgtcatttctatcgcttgcggtttgttcggtaaggaactactccacaatacgaacttgatatcatggtctttaatgtttaaagccttctttgctctggtcccaattctaagtttcaattttttcgcagccattgtgaatcaaatctatgatgttgaaatagataggattaacaagccggatttaccactcgtgtccggagaaatgtctatacgcacagcttggatcctgtcgattattgtcgctcttactggcttgatagttaccattaaaatgaaaggtggccctttatttgtgtttatctatataactggtatattcgcaggttttgcttactctgtacctccaattcgatggaagcagtatccgttcactaactttttgatcaccatttcaagccatgttggactagccttcacatcctactatgcttctagagccgcgcttggtctaccatttgaactgcgcccctcatttagttttataattgcattcatgacagttatggggatgactattgcctttgcaaaggacatttcagatattgaaggagatgcaaaatatggtgtctctacggtagctactaaattaggtgctagaaatatgacccgggttgtgtcgggggtgttgctattaaattacttagtcagtattttggcaggaataatctggccctttgcttttaattcaaatgtcatgatcttatcgcacgcaattttggccttctgtctcatctttcaaacgagagaattagcccttgctaactacgcaagtgctccttcccgtcaatttttcgagtttatttggaacctgtattatgcggaatacctggtatacgttttcatt

SEQ ID NO: 929 - DNA, 969 bp, Artificial Sequence
  Synthetic
atgtccgcaggatcagatcaaatagaagggagcccccatcacgagtcggacaacagtatcgcgacaaaaattcttaattttggccatactttctggaagttacagcgtccttacgtagttaaaggtatgatttctatcgcttgcggtttgttcggtaaggaactactccacaatacgaacttgatatcatggtctttaatgtttaaagccttctttgctctggtcccaattctaagtttcaatggattcgcagccgtggttaatcaaatctatgatgttgagatagataggattaacaagccggatttaccactcgtgtccggagaaatgtctatagagacagcttggatcctgtcgattattgtcgctcttactggcttgatagttaccattaaaatgaaaggtggccctttatttgtgtttatctatatactaggtttgttcgcaggttttgcttactctgtacctccaattcgatggaagcagtatccgttcactaactttttgatcaccatttcaagccatgttggactagccttcacatcctactatgcttctagagccgcgcttggtctaccatttgaactgcgcccctcatttagttttataattgcattcatgacagttatggggatgactattgcctttgcaaaggacatttcagatattgaaggagatgcaaaatatggtgtctctacggtagctactaaattaggtgctagaaatatgaccagagttgtgtcgggggtgttgctattaaattacttagtcagtattttggcaggaataatctggccccaagcttttaattcaaatgtcatgatcttatcgcacgcaattttggccttctgtctcatctttcaaacgagagaattagcccttgctaactacgcaagtgctccttcccgtcaatttttcgagtttatttggaatctgtattatgcggaatacctggtatacgttttcatt

SEQ ID NO: 930 - DNA, 969 bp, Artificial Sequence
  Synthetic
atgtcagccgggagcgaccagatagaaggaagtcctcatcacgagtctgataactccattgcgacaaaaatcctgaatttcggtcatacgttttggaagttacaaaggccctatgtcgtgaaaggtatgatttcgatagcttgtggcttgtttggtcgcgaactatttcataataccaaccttttatcttggtcattgatgctcaaggcattctcatccttaatggtaatcctttcttttaatttctttgctgccgcaatgaatcaaatttacgatgttgaaattgaccgaattaacaaaccagatttgccactcgttagtggagagatgagtatcgaaactgcatggatactatcgatcattgtcgctctgacaggcttaatattgactattaagcttaattgtggtccgctatttatatcattgtattgcgtatctattttcgctggatttgcatacagcgttcctccaattcgttggaaacagtatcctttcaccaacttcttaataactatcagctcacacgtgggtgttaactttacatgttattacgcctccagagcagcctttggcttacccttcgaaatgtctccgccatttacttttattctcgcttttatgaccgtaatgggaatgacaatagctttcgcgaaagacatttcagatatcgaaggtgatgcgaaatatggggtgtctactgttgctacgaagttaggtgcaagaaatatgacgagggttgtcagtggtgtcttgttgctgacatacgtaagcgctatacttgcagctatcatttggccgcaagcctttaagtcaaatgtgatgttgttatctcatgccatcctggcgttctgcctaattttccaaactagagagctagcgcttgcaaattatgcttctgcacctagtaggcagttttttgaatttatctggaaattgcattatgcagagtacttagtttatgttttcatc

SEQ ID NO: 931 - DNA, 969 bp, Artificial Sequence
  Synthetic
atgtccgcaggatcagatcaaatagaagggagcccccatcacgagtcggacaacagtatcgcgacaaaaattcttaattttggccatacttgttggaagttacagcgtccttacgtagttaaaggtatgatttcttgcgcttgcggtttgttcggtaaggaactactccacaatacgaacttgatatcatggtctttaatgtttaaagccttctttgctctggtcccaattctaagtttcaatggtttcgcagccattatgaatcaaatctatgatgttgagatagataggattaacaagccggatttaccactcgtgtccggagaaatgtctatacgcacagcttggatcctgtcgattattgtcgctcttactggcttgatagttaccattaaaatgaaaggtggccctttatttgtgtttatctatatatttggtttattcgcaggttttgcttactctgtacctccaattcgatggaagcagtatccgttcactaactttttgatcaccatttcaagccatgttggactagccttcacatcctactatgcttctagagccgcgcttggtctaccatttgaactgcgcccctcatttagttttataattgcattcatgacagttatggggatgactattgcctttgcaaaggacatttcagatattgaaggagatgcaaaatatggtgtctctacggtagctactaaattaggtgctagaaatatgaccagggttgtgtcgggggtgttgctattaaattacttagtcagtattttggcaggaataatctggccctttgcttttaattcaaatgtcatgatcttatcgcacgcaattttggccttctgtctcatctttagaacgagagaattagcccttgctaactacgcaagtgctccttcccgtcaatttttcgagtttatttggaacctgtattatgcggaatacctggtatacgttttcatt

SEQ ID NO: 932 - DNA, 969 bp, Artificial Sequence
  Synthetic
atgtccgcaggatcagatcaaatagaagggagcccccatcacgagtcggacaacagtatcgcgacaaaaattcttaattttggccatactttctggaagttacagcgtccttacgtagttaaaggtttgatttctatcgcttgcggtttgttcggtaaggaactactccacaatacgaacttgatatcatggtctttaatgtttaaagccttctttgctctggtcccaattctaagtttcaattttttcgcagccggagttaatcaaatctatgatgttgaaatagataggattaacaagccggatttaccactcgtgtccggagaaatgtctatagagacagcttggatcctgtcgattattgtcgctcttactggcttgatagttaccattaaaatgaaaggtggccctttatttgtgtttatctatatactaggtttattcgcaggttttgcttactctgtacctccaattcgatggaagcagtatccgttcactaactttttgatcaccatttcaagccatgttggactagccttcacatcctactatgcttctagagccgcgcttggtctaccatttgaactgcgcccctcatttagttttataattgcattcatgacagttatggggatgactattgcctttgcaaaggacatttcagatattgaaggagatgcaaaatatggtgtctctacggtagctactaaattaggtgctagaaatatgaccagagttgtgtcgggggtgttgctattaaattacttagtcagtattttggcaggaataatctggccccaagcttttaattcaaatgtcatgatcttatcgcacgcaattttggccttctgtctcatctttcaaacgagagaattagcccttgctaactacgcaagtgctccttcccgtcaatttttcgagtttatttggaacctgtattatgcggaatacctggtatacgttttcatt

SEQ ID NO: 933 - DNA, 969 bp, Artificial Sequence
  Synthetic
atgtccgcaggatcagatcaaatagaagggagcccccatcacgagtcggacaacagtatcgcgacaaaaattcttaattttggccatacttgttggaagttacagcgtccttacgtagttaaaggtctaatttctatcgcttgcggtttgttcggtaaggaactactccacaatacgaacttgatatcatggtctttaatgtttaaagccttctttgctctggtcccaattctaagtttcaattttttcgcagccgcaatgaatcaaatctatgatgttgaaatagataggattaacaagccggatttaccactcgtgtccggagaaatgtctataagaacagcttggatcctgtcgattattgtcgctcttactggcttgatagttaccattaaaatgaaaggtggccctttatttgtgtttatctatatatttggtctgttcgcaggttttgcttactctgtacctccaattcgatggaagcagtatccgttcactaactttttgatcaccatttcaagccatgttggactagccttcacatcctactatgcttctagagccgcgcttggtctaccatttgaactgcgcccctcatttagttttataattgcattcatgacagttatggggatgactattgcctttgcaaaggacatttcagatattgaaggagatgcaaaatatggtgtctctacggtagctactaaattaggtgctagaaatatgacccgggttgtgtcgggggtgttgctattaaattacttagtcagtattttggcaggaataatctggcccttcgcttttaattcaaatgtcatgatcttatcgcacgcaattttggccttctgtctcatctttcgtacgagagaattagcccttgctaactacgcaagtgctccttcccgtcaatttttcgagtttatttggaacctgtattatgcggaatacctggtatacgttttcatt

SEQ ID NO: 934 - DNA, 969 bp, Artificial Sequence
  Synthetic
atgtcagccgggagcgaccagatagaaggaagtcctcatcacgagtctgataactccattgcgacaaaaatcctgaatttcggtcatacgtgctggaagttacaaaggccctatgtcgtgaaaggtttgatttcgatagcttgtggcttgtttggtcgcgaactatttcataataccaaccttttatcttggtcattgatgctcaaggcattctcatccttaatggtaatcctttcttttaatttctttgctgcctctatgaatcaaatttacgatgttgatattgaccgaattaacaaaccagatttgccactcgttagtggagagatgagtatcgaaactgcatggatactatcgatcattgtcgctctgacaggcttaatattgactattaagcttaattgtggtccgctatttatatcattgtattgcgtatctattttcgctggatttgcatacagcgttcctccaattcgttggaaacagtatcctttcaccaacttcttaataactatcagctcacacgtgggtgttaactttacatgttattacgcctccagagcagcctttggcttacccttcgaaatgtctccgccatttacttttattctcgcttttatgaccgtaatgggaatgacaatagctttcgcgaaagacatttcagatatcgaaggtgatgcgaaatatggggtgtctactgttgctacgaagttaggtgcaagaaatatgacgtttgttgtcagtggtgtcttgttgctgacatacgtaagcgctatacttgcagctatcatttggccgcaagcctttaagtcaaatgtgatgttgttatctcatgccatcctggcgttctgcctaattttccaaactagagagctagcgcttgcaaattatgcttctgcacctagtaggcagttttttgaatttatctggaaattgcattatgcagagtacttagtttatgttttcatc

SEQ ID NO: 935 - DNA, 969 bp, Artificial Sequence
  Synthetic
atgtccgcaggatcagatcaaatagaagggagcccccatcacgagtcggacaacagtatcgcgacaaaaattcttaattttggccatacttgttggaagttacagcgtccttacgtagttaaaggtttgatttctatcgcttgcggtttgttcggtaaggaactactccacaatacgaacttgatatcatggtctttaatgtttaaagccttctttgctctggtcccaattctaagtttcaatggattcgcagccgttgtgaatcaaatctatgatgttgaaatagataggattaacaagccggatttaccactcgtgtccggagaaatgtctatagagacagcttggatcctgtcgattattgtcgctcttactggcttgatagttaccattaaaatgaaaggtggccctttatttgtgtttatctatatacttggtttattcgcaggttttgcttactctgtacctccaattcgatggaagcagtatccgttcactaactttttgatcaccatttcaagccatgttggactagccttcacatcctactatgcttctagagccgcgcttggtctaccatttgaactgcgcccctcatttagttttataattgcattcatgacagttatggggatgactattgcctttgcaaaggacatttcagatattgaaggagatgcaaaatatggtgtctctacggtagctactaaattaggtgctagaaatatgaccagagttgtgtcgggggtgttgctattaaattacttagtcagtattttggcaggaataatctggccccaagcttttaattcaaatgtcatgatcttatcgcacgcaattttggccttctgtctcatctttcaaacgagagaattagcccttgctaactacgcaagtgctccttcccgtcaatttttcgagtttatttggaacctgtattatgcggaatacctggtatacgttttcatt

SEQ ID NO: 936 - DNA, 969 bp, Artificial Sequence
  Synthetic
atgtcagccgggagcgaccagatagaaggaagtcctcatcacgagtctgataactccattgcgacaaaaatcctgaatttcggtcatacgttttggaagttacaaaggccctatgtcgtgaaaggtatgatttcgatagcttgtggcttgtttggtcgcgaactatttcataataccaaccttttatcttggtcattgatgctcaaggcattctcatccttaatggtaatcctttcttttaatttctttgctgccgttgtaaatcaaatttacgatgttgatattgaccgaattaacaaaccagatttgccactcgttagtggagagatgagtatcgaaactgcatggatactatcgatcattgtcgctctgacaggcttaatattgactattaagcttaattgtggtccgctatttatatcattgtattgcgtatctattttcgctggatttgcatacagcgttcctccaattcgttggaaacagtatcctttcaccaacttcttaataactatcagctcacacgtgggtgttaactttacatgttattacgcctccagagcagcctttggcttacccttcgaaatgtctccgccatttacttttattctcgcttttatgaccgtaatgggaatgacaatagctttcgcgaaagacatttcagatatcgaaggtgatgcgaaatatggggtgtctactgttgctacgaagttaggtgcaagaaatatgacgtttgttgtcagtggtgtcttgttgctgacatacgtaagcgctatacttgcagctatcatttggccgcaagcctttaagtcaaatgtgatgttgttatctcatgccatcctggcgttctgcctaattttccaaactagagagctagcgcttgcaaattatgcttctgcacctagtaggcagttttttgaatttatctggaaattgcattatgcagagtacttagtttatgttttcatc

SEQ ID NO: 937 - DNA, 969 bp, Artificial Sequence
  Synthetic
atgtcagccgggagcgaccagatagaaggaagtcctcatcacgagtctgataactccattgcgacaaaaatcctgaatttcggtcatacgtgctggaagttacaaaggccctatgtcgtgaaaggtatgatttcgatagcttgtggcttgtttggtcgcgaactatttcataataccaaccttttatcttggtcattgatgctcaaggcattctcatccttaatggtaatcctttcttttaatttctttgctgccgggatgaatcaaatttacgatgttgatattgaccgaattaacaaaccagatttgccactcgttagtggagagatgagtatcgaaactgcatggatactatcgatcattagcgctctgacaggcttaatattgactattaagcttaattgtggtccgctatttatatcattgtattgcgtatctattttcgctggatttgcatacagcgttcctccaattcgttggaaacagtatcctttcaccaacttcttaataactatcagctcacacgtgggtgttaactttacatgttattacgcctccagagcagcctttggcttacccttcgaaatgtctccgccatttacttttattctcgcttttatgaccgtaatgggaatgacaatagctttcgcgaaagacatttcagatatcgaaggtgatgcgaaatatggggtgtctactgttgctacgaagttaggtgcaagaaatatgacgtttgttgtcagtggtgtcttgttgctgacatacgtaagcgctatacttgcagctatcatttggccgcaagcctttaagtcaaatgtgatgttgttatctcatgccatcctggcgttctgcctaattttccaaactagagagctagcgcttgcaaattatgcttctgcacctagtaggcagttttttgaatttatctggaaattgcattatgcagagtacttagtttatgttttcatc

SEQ ID NO: 938 - DNA, 969 bp, Artificial Sequence
  Synthetic
atgtccgcaggatcagatcaaatagaagggagcccccatcacgagtcggacaacagtatcgcgacaaaaattcttaattttggccatactttctggaagttacagcgtccttacgtagttaaaggtgtcatttctatcgcttgcggtttgttcggtaaggaactactccacaatacgaacttgatatcatggtctttaatgtttaaagccttctttgctctggtcccaattctaagtttcaatgggttcgcagccattatgaatcaaatctatgatgttgaaatagataggattaacaagccggatttaccactcgtgtccggagaaatgtctatacgcacagcttggatcctgtcgattattgtcgctcttactggcttgatagttaccattaaaatgaaaggtggccctttatttgtgtttatctatataagtggtatattcgcaggttttgcttactctgtacctccaattcgatggaagcagtatccgttcactaactttttgatcaccatttcaagccatgttggactagccttcacatcctactatgcttctagagccgcgcttggtctaccatttgaactgcgcccctcatttagttttataattgcattcatgacagttatggggatgactattgcctttgcaaaggacatttcagatattgaaggagatgcaaaatatggtgtctctacggtagctactaaattaggtgctagaaatatgaccagagttgtgtcgggggtgttgctattaaattacttagtcagtattttggcaggaataatctggccccaagcttttaattcaaatgtcatgatcttatcgcacgcaattttggccttctgtctcatctttcgtacgagagaattagcccttgctaactacgcaagtgctccttcccgtcaatttttcgagtttatttggagactgtattatgcggaatacctggtatacgttttcatt

SEQ ID NO: 939 - DNA, 969 bp, Artificial Sequence
  Synthetic
atgtccgcaggatcagatcaaatagaagggagcccccatcacgagtcggacaacagtatcgcgacaaaaattcttaattttggccatactttctggaagttacagcgtccttacgtagttaaaggtctgatttctatcgcttgcggtttgttcggtaaggaactactccacaatacgaacttgatatcatggtctttaatgtttaaagccttctttgctctggtcccaattctaagtttcaatggattcgcagccattatgaatcaaatctatgatgttgaaatagataggattaacaagccggatttaccactcgtgtccggagaaatgtctataagaacagcttggatcctgtcgattattgtcgctcttactggcttgatagttaccattaaaatgaaaggtggccctttatttgtgtttatctatataactggtatattcgcaggttttgcttactctgtacctccaattcgatggaagcagtatccgttcactaactttttgatcaccatttcaagccatgttggactagccttcacatcctactatgcttctagagccgcgcttggtctaccatttgaactgcgcccctcatttagttttataattgcattcatgacagttatggggatgactattgcctttgcaaaggacatttcagatattgaaggagatgcaaaatatggtgtctctacggtagctactaaattaggtgctagaaatatgaccagggttgtgtcgggggtgttgctattaaattacttagtcagtattttggcaggaataatctggcccttcgcttttaattcaaatgtcatgatcttatcgcacgcaattttggccttctgtctcatctttcaaacgagagaattagcccttgctaactacgcaagtgctccttcccgtcaatttttcgagtttatttggaatctgtattatgcggaatacctggtatacgttttcatt

SEQ ID NO: 940 - DNA, 969 bp, Artificial Sequence
  Synthetic
atgtcagccgggagcgaccagatagaaggaagtcctcatcacgagtctgataactccattgcgacaaaaatcctgaatttcggtcatacgtgctggaagttacaaaggccctatgtcgtgaaaggtatgatttcgatagcttgtggcttgtttggtcgcgaactatttcataataccaaccttttatcttggtcattgatgctcaaggcattctcatccttaatggtaatcctttcttttaatttctacgctgccactgttaatcaaatttacgatgttgatattgaccgaattaacaaaccagatttgccactcgttagtggagagatgagtatcgaaactgcatggatactatcgatcattgtcgctctgacaggcttaatattgactattaagcttaattgtggtccgctatttatatcattgtattgcgtatctattttcgctggatttgcatacagcgttcctccaattcgttggaaacagtatcctttcaccaacttcttaataactatcagctcacacgtgggtgttaactttacatgttattacgcctccagagcagcctttggcttacccttcgaaatgtctccgccatttacttttattctcgcttttatgaccgtaatgggaatgacaatagctttcgcgaaagacatttcagatatcgaaggtgatgcgaaatatggggtgtctactgttgctacgaagttaggtgcaagaaatatgacgtttgttgtcagtggtgtcttgttgctgacatacgtaagcgctatacttgcagctatcatttggccgcaagcctttaagtcaaatgtgatgttgttatctcatgccatcctggcgttctgcctaattttccaaactagagagctagcgcttgcaaattatgcttctgcacctagtaggcagttttttgaatttatctggaaattgcattatgcagagtacttagtttatgttttcatc

SEQ ID NO: 941 - DNA, 969 bp, Artificial Sequence
  Synthetic
atgtcagccgggagcgaccagatagaaggaagtcctcatcacgagtctgataactccattgcgacaaaaatcctgaatttcggtcatacgtgctggaagttacaaaggccctatgtcgtgaaaggtatgatttcgatagcttgtggcttgtttggtcgcgaactatttcataataccaaccttttatcttggtcattgatgctcaaggcattctcatccttaatggtaatcctttcttttaatttctttgctgccggaattaatcaaatttacgatgttgatattgaccgaattaacaaaccagatttgccactcgttagtggagagatgagtatcgaaactgcatggatactatcgatcattgtcgctctgacaggcttaatattgactattaagcttaattgtggtccgctatttatatcattgtattgcgtatctattttcgctggatttgcatacagcgttcctccaattcgttggaaacagtatcctttcaccaacttcttaataactatcagctcacacgtgggtgttaactttacatgttattacgcctccagagcagcctttggcttacccttcgaaatgtctccgccatttacttttattctcgcttttatgaccgtaatgggaatgacaatagctttcgcgaaagacatttcagatatcgaaggtgatgcgaaatatggggtgtctactgttgctacgaagttaggtgcaagaaatatgacgtttgttgtcagtggtgtcttgttgctgacatacgtaagcgctatacttgcagctatcatttggccgcaagcctttaagtcaaatgtgatgttgttatctcatgccatcctggcgttctgcctaattttccaaactagagagctagcgcttgcaaattatgcttctgcacctagtaggcagttttttgaatttatctggaaattgcattatgcagagtacttagtttatgttttcatc

SEQ ID NO: 942 - DNA, 969 bp, Artificial Sequence
  Synthetic
atgtcagccgggagcgaccagatagaaggaagtcctcatcacgagtctgataactccattgcgacaaaaatcctgaatttcggtcatacgttttggaagttacaaaggccctatgtcgtgaaaggtatgatttcgatagcttgtggcttgtttggtcgcgaactatttcataataccaaccttttatcttggtcattgatgctcaaggcattctcatccttaatggtaatcctttcttttaatggatttgctgccataatgaatcaaatttacgatgttgaaattgaccgaattaacaaaccagatttgccactcgttagtggagagatgagtatcgaaactgcatggatactatcgatcattgtcgctctgacaggcttaatattgactattaagcttaattgtggtccgctatttatatcattgtattgcgtatctttattcgctggatttgcatacagcgttcctccaattcgttggaaacagtatcctttcaccaacttcttaataactatcagctcacacgtgggtgttaactttacatgttattacgcctccagagcagcctttggcttacccttcgaaatgtctccgccatttacttttattctcgcttttatgaccgtaatgggaatgacaatagctttcgcgaaagacatttcagatatcgaaggtgatgcgaaatatggggtgtctactgttgctacgaagttaggtgcaagaaatatgacgtttgttgtcagtggtgtcttgttgctgacatacgtaagcgctatacttgcagctatcatttggccgcaagcctttaagtcaaatgtgatgttgttatctcatgccatcctggcgttctgcctaattttccaaactagagagctagcgcttgcaaattatgcttctgcacctagtaggcagttttttgaatttatctggaaattgcattatgcagagtacttagtttatgttttcatc

SEQ ID NO: 943 - DNA, 969 bp, Artificial Sequence
  Synthetic
atgtcagccgggagcgaccagatagaaggaagtcctcatcacgagtctgataactccattgcgacaaaaatcctgaatttcggtcatacgtgctggaagttacaaaggccctatgtcgtgaaaggtatgatttcgatagcttgtggcttgtttggtcgcgaactatttcataataccaaccttttatcttggtcattgatgctcaaggcattctcatccttaatggtaatcctttcttttaatttctacgctgcctcgattaatcaaatttacgatgttgatattgaccgaattaacaaaccagatttgccactcgttagtggagagatgagtatcgaaactgcatggatactatcgatcattgtcgctctgacaggcttaatattgactattaagcttaattgtggtccgctatttatatcattgtattgcgtatctattttcgctggaactgcatacagcgttcctccaattcgttggaaacagtatcctttcaccaacttcttaataactatcagctcacacgtgggtgttaactttacatgttattacgcctccagagcagcctttggcttacccttcgaaatgtctccgccatttacttttattctcgcttttatgaccgtaatgggaatgacaatagctttcgcgaaagacatttcagatatcgaaggtgatgcgaaatatggggtgtctactgttgctacgaagttaggtgcaagaaatatgacgtttgttgtcagtggtgtcttgttgctgacatacgtaagcgctatacttgcagctatcatttggccgcaagcctttaagtcaaatgtgatgttgttatctcatgccatcctggcgttctgcctaattttccaaactagagagctagcgcttgcaaattatgcttctgcacctagtaggcagttttttgaatttatctggaaattgcattatgcagagtacttagtttatgttttcatc

SEQ ID NO: 944 - DNA, 969 bp, Artificial Sequence
  Synthetic
atgtcagccgggagcgaccagatagaaggaagtcctcatcacgagtctgataactccattgcgacaaaaatcctgaatttcggtcatacgtgctggaagttacaaaggccctatgtcgtgaaaggtatgatttcgatagcttgtggcttgtttggtcgcgaactatttcataataccaaccttttatcttggtcattgatgctcaaggcattctcatccttaatggtaatcctttcttttaatttctttgctgccgcaatgaatcaaatttacgatgttgatattgaccgaattaacaaaccagatttgccactcgttagtggagagatgagtatcgaaactgcatggatactatcgatcatttctgctctgacaggcttaatattgactattaagcttaattgtggtccgctatttatatcattgtattgcgtatctattttcgctggatttgcatacagcgttcctccaattcgttggaaacagtatcctttcaccaacttcttaataactatcagctcacacgtgggtgttaactttacatgttattacgcctccagagcagcctttggcttacccttcgaaatgtctccgccatttacttttattctcgcttttatgaccgtaatgggaatgacaatagctttcgcgaaagacatttcagatatcgaaggtgatgcgaaatatggggtgtctactgttgctacgaagttaggtgcaagaaatatgacgtttgttgtcagtggtgtcttgttgctgacatacgtaagcgctatacttgcagctatcatttggccgcaagcctttaagtcaaatgtgatgttgttatctcatgccatcctggcgttctgcctaattttccaaactagagagctagcgcttgcaaattatgcttctgcacctagtaggcagttttttgaatttatctggaaattgcattatgcagagtacttagtttatgttttcatc

SEQ ID NO: 945 - DNA, 969 bp, Artificial Sequence
  Synthetic
atgtcagccgggagcgaccagatagaaggaagtcctcatcacgagtctgataactccattgcgacaaaaatcctgaatttcggtcatacgtgctggaagttacaaaggccctatgtcgtgaaaggtatgatttcgatagcttgtggcttgtttggtcgcgaactatttcataataccaaccttttatcttggtcattgatgctcaaggcattctcatccttaatggtaatcctttcttttaatttctttgctgccactatgaatcaaatttacgatgttgatattgaccgaattaacaaaccagatttgccactcgttagtggagagatgagtatcgaaactgcatggatactagctatcattgtcgctctgacaggcttaatattgactattaagcttaattgtggtccgctatttatatcattgtattgcgtatctattttcgctggatttgcatacagcgttcctccaattcgttggaaacagtatcctttcaccaacttcttaataactatcagctcacacgtgggtgttaactttacatgttattacgcctccagagcagcctttggcttacccttcgaaatgtctccgccatttacttttattctcgcttttatgaccgtaatgggaatgacaatagctttcgcgaaagacatttcagatatcgaaggtgatgcgaaatatggggtgtctactgttgctacgaagttaggtgcaagaaatatgacgtttgttgtcagtggtgtcttgttgctgacatacgtaagcgctatacttgcagctatcatttggccgcaagcctttaagtcaaatgtgatgttgttatctcatgccatcctggcgttctgcctaattttccaaactagagagctagcgcttgcaaattatgcttctgcacctagtaggcagttttttgaatttatctggaaattgcattatgcagagtacttagtttatgttttcatc

SEQ ID NO: 946 - DNA, 969 bp, Artificial Sequence
  Synthetic
atgtccgcaggatcagatcaaatagaagggagcccccatcacgagtcggacaacagtatcgcgacaaaaattcttaattttggccatactttctggaagttacagcgtccttacgtagttaaaggtatgatttcttgtgcttgcggtttgttcggtaaggaactactccacaatacgaacttgatatcatggtctttaatgtttaaagccttctttgctctggtcccaattctaagtttcaattttttcgcagccgctatgaatcaaatctatgatgttgaaatagataggattaacaagccggatttaccactcgtgtccggagaaatgtctatacgcacagcttggatcctgtcgattattgtcgctcttactggcttgatagttaccattaaaatgaaaggtggccctttatttgtgtttatctatatatttggtttattcgcaggttttgcttactctgtacctccaattcgatggaagcagtatccgttcactaactttttgatcaccatttcaagccatgttggactagccttcacatcctactatgcttctagagccgcgcttggtctaccatttgaactgcgcccctcatttagttttataattgcattcatgacagttatggggatgactattgcctttgcaaaggacatttcagatattgaaggagatgcaaaatatggtgtctctacggtagctactaaattaggtgctagaaatatgaccttcgttgtgtcgggggtgttgctattaaattacttagtcagtattttggcaggaataatctggccctttgcttttaattcaaatgtcatgatcttatcgcacgcaattttggccttctgtctcatctttagaacgagagaattagcccttgctaactacgcaagtgctccttcccgtcaatttttcgagtttatttggaacctgtattatgcggaatacctggtatacgttttcatt

SEQ ID NO: 947 - DNA, 969 bp, Artificial Sequence
  Synthetic
atgtccgcaggatcagatcaaatagaagggagcccccatcacgagtcggacaacagtatcgcgacaaaaattcttaattttggccatactttctggaagttacagcgtccttacgtagttaaaggtatgatttcttgcgcttgcggtttgttcggtaaggaactactccacaatacgaacttgatatcatggtctttaatgtttaaagccttctttgctctggtcccaattctaagtttcaattttttcgcagcctctatgaatcaaatctatgatgttgaaatagataggattaacaagccggatttaccactcgtgtccggagaaatgtctataagaacagcttggatcctgtcgattattgtcgctcttactggcttgatagttaccattaaaatgaaaggtggccctttatttgtgtttatctatatatttggtttattcgcaggttttgcttactctgtacctccaattcgatggaagcagtatccgttcactaactttttgatcaccatttcaagccatgttggactagccttcacatcctactatgcttctagagccgcgcttggtctaccatttgaactgcgcccctcatttagttttataattgcattcatgacagttatggggatgactattgcctttgcaaaggacatttcagatattgaaggagatgcaaaatatggtgtctctacggtagctactaaattaggtgctagaaatatgacccgggttgtgtcgggggtgttgctattaaattacttagtcagtattttggcaggaataatctggccccaagcttttaattcaaatgtcatgatcttatcgcacgcaattttggccttctgtctcatctttaggacgagagaattagcccttgctaactacgcaagtgctccttcccgtcaatttttcgagtttatttggcgcctgtattatgcggaatacctggtatacgttttcatt

SEQ ID NO: 948 - DNA, 969 bp, Artificial Sequence
  Synthetic
atgtccgcaggatcagatcaaatagaagggagcccccatcacgagtcggacaacagtatcgcgacaaaaattcttaattttggccatactttctggaagttacagcgtccttacgtagttaaaggtatgatttcttgcgcttgcggtttgttcggtaaggaactactccacaatacgaacttgatatcatggtctttaatgtttaaagccttctttgctctggtcccaattctaagtttcaattttttcgcagccattgtgaatcaaatctatgatgttgaaatagataggattaacaagccggatttaccactcgtgtccggagaaatgtctatacgcacagcttggatcctgtcgattattgtcgctcttactggcttgatagttaccattaaaatgaaaggtggccctttatttgtgtttatctatataacgggtatattcgcaggttttgcttactctgtacctccaattcgatggaagcagtatccgttcactaactttttgatcaccatttcaagccatgttggactagccttcacatcctactatgcttctagagccgcgcttggtctaccatttgaactgcgcccctcatttagttttataattgcattcatgacagttatggggatgactattgcctttgcaaaggacatttcagatattgaaggagatgcaaaatatggtgtctctacggtagctactaaattaggtgctagaaatatgaccagagttgtgtcgggggtgttgctattaaattacttagtcagtattttggcaggaataatctggccccaagcttttaattcaaatgtcatgatcttatcgcacgcaattttggccttctgtctcatctttagaacgagagaattagcccttgctaactacgcaagtgctccttcccgtcaatttttcgagtttatttggaggctgtattatgcggaatacctggtatacgttttcatt

SEQ ID NO: 949 - DNA, 969 bp, Artificial Sequence
  Synthetic
atgtccgcaggatcagatcaaatagaagggagcccccatcacgagtcggacaacagtatcgcgacaaaaattcttaattttggccatactttctggaagttacagcgtccttacgtagttaaaggtatgatttctatcgcttgcggtttgttcggtaaggaactactccacaatacgaacttgatatcatggtctttaatgtttaaagccttctttgctctggtcccaattctaagtttcaatggattcgcagccgttgtgaatcaaatctatgatgttgaaatagataggattaacaagccggatttaccactcgtgtccggagaaatgtctatagagacagcttggatcctgtcgattattgtcgctcttactggcttgatagttaccattaaaatgaaaggtggccctttatttgtgtttatctatatacttggtctattcgcaggttttgcttactctgtacctccaattcgatggaagcagtatccgttcactaactttttgatcaccatttcaagccatgttggactagccttcacatcctactatgcttctagagccgcgcttggtctaccatttgaactgcgcccctcatttagttttataattgcattcatgacagttatggggatgactattgcctttgcaaaggacatttcagatattgaaggagatgcaaaatatggtgtctctacggtagctactaaattaggtgctagaaatatgacccgggttgtgtcgggggtgttgctattaaattacttagtcagtattttggcaggaataatctggccccaagcttttaattcaaatgtcatgatcttatcgcacgcaattttggccttctgtctcatctttcaaacgagagaattagcccttgctaactacgcaagtgctccttcccgtcaatttttcgagtttatttggagactgtattatgcggaatacctggtatacgttttcatt

SEQ ID NO: 950 - DNA, 969 bp, Artificial Sequence
  Synthetic
atgtcagccgggagcgaccagatagaaggaagtcctcatcacgagtctgataactccattgcgacaaaaatcctgaatttcggtcatacgtgctggaagttacaaaggccctatgtcgtgaaaggtcttatttcgatagcttgtggcttgtttggtcgcgaactatttcataataccaaccttttatcttggtcattgatgctcaaggcattctcatccttaatggtaatcctttcttttaatttctttgctgccataatgaatcaaatttacgatgttgatattgaccgaattaacaaaccagatttgccactcgttagtggagagatgagtatcgaaactgcatggatactatcgatcattgtcgctctgacaggcttaatattgactattaagcttaattgtggtccgctatttatatcattgtattgcgtatctttattcgctggatttgcatacagcgttcctccaattcgttggaaacagtatcctttcaccaacttcttaataactatcagctcacacgtgggtgttaactttacatgttattacgcctccagagcagcctttggcttacccttcgaaatgtctccgccatttacttttattctcgcttttatgaccgtaatgggaatgacaatagctttcgcgaaagacatttcagatatcgaaggtgatgcgaaatatggggtgtctactgttgctacgaagttaggtgcaagaaatatgacgagagttgtcagtggtgtcttgttgctgacatacgtaagcgctatacttgcagctatcatttggccgcaagcctttaagtcaaatgtgatgttgttatctcatgccatcctggcgttctgcctaattttccaaactagagagctagcgcttgcaaattatgcttctgcacctagtaggcagttttttgaatttatctggaaattgcattatgcagagtacttagtttatgttttcatc

SEQ ID NO: 951 - DNA, 969 bp, Artificial Sequence
  Synthetic
atgtcagccgggagcgaccagatagaaggaagtcctcatcacgagtctgataactccattgcgacaaaaatcctgaatttcggtcatacgtgctggaagttacaaaggccctatgtcgtgaaaggtatgatttcgatagcttgtggcttgtttggtcgcgaactatttcataataccaaccttttatcttggtcattgatgctcaaggcattctcatccttaatggtaatcctttcttttaatttctacgctgccgcaactaatcaaatttacgatgttgatattgaccgaattaacaaaccagatttgccactcgttagtggagagatgagtatcgaaactgcatggatactatcgatcattgtcgctctgacaggcttaatattgactattaagcttaattgtggtccgctatttatatcattgtattgcgtatctattttcgctggaacggcatacagcgttcctccaattcgttggaaacagtatcctttcaccaacttcttaataactatcagctcacacgtgggtgttaactttacatgttattacgcctccagagcagcctttggcttacccttcgaaatgtctccgccatttacttttattctcgcttttatgaccgtaatgggaatgacaatagctttcgcgaaagacatttcagatatcgaaggtgatgcgaaatatggggtgtctactgttgctacgaagttaggtgcaagaaatatgacgtttgttgtcagtggtgtcttgttgctgacatacgtaagcgctatacttgcagctatcatttggccgcaagcctttaagtcaaatgtgatgttgttatctcatgccatcctggcgttctgcctaattttccaaactagagagctagcgcttgcaaattatgcttctgcacctagtaggcagttttttgaatttatctggaaattgcattatgcagagtacttagtttatgttttcatc

SEQ ID NO: 952 - DNA, 969 bp, Artificial Sequence
  Synthetic
atgtcagccgggagcgaccagatagaaggaagtcctcatcacgagtctgataactccattgcgacaaaaatcctgaatttcggtcatacgtgctggaagttacaaaggccctatgtcgtgaaaggtatgatttcgatagcttgtggcttgtttggtcgcgaactatttcataataccaaccttttatcttggtcattgatgctcaaggcattctcatccttaatggtaatcctttcttttaatttctttgctgccgcagttaatcaaatttacgatgttgatattgaccgaattaacaaaccagatttgccactcgttagtggagagatgagtatcgaaactgcatggatactatcgatcattgtcgctctgacaggcttaatattgactattaagcttaattgtggtccgctatttatatcattgtattgcgtatctttattcgctggatttgcatacagcgttcctccaattcgttggaaacagtatcctttcaccaacttcttaataactatcagctcacacgtgggtgttaactttacatgttattacgcctccagagcagcctttggcttacccttcgaaatgtctccgccatttacttttattctcgcttttatgaccgtaatgggaatgacaatagctttcgcgaaagacatttcagatatcgaaggtgatgcgaaatatggggtgtctactgttgctacgaagttaggtgcaagaaatatgacgtttgttgtcagtggtgtcttgttgctgacatacgtaagcgctatacttgcagctatcatttggccgcaagcctttaagtcaaatgtgatgttgttatctcatgccatcctggcgttctgcctaattttccaaactagagagctagcgcttgcaaattatgcttctgcacctagtaggcagttttttgaatttatctggaaattgcattatgcagagtacttagtttatgttttcatc

SEQ ID NO: 953 - DNA, 969 bp, Artificial Sequence
  Synthetic
atgtcagccgggagcgaccagatagaaggaagtcctcatcacgagtctgataactccattgcgacaaaaatcctgaatttcggtcatacgtgctggaagttacaaaggccctatgtcgtgaaaggtatgatttcgatagcttgtggcttgtttggtcgcgaactatttcataataccaaccttttatcttggtcattgatgctcaaggcattctcatccttaatggtaatcctttcttttaatttctttgctgccgttacaaatcaaatttacgatgttgatattgaccgaattaacaaaccagatttgccactcgttagtggagagatgagtatcgaaactgcatggatactagctatcattgtcgctctgacaggcttaatattgactattaagcttaattgtggtccgctatttatatcattgtattgcgtatctattttcgctggatttgcatacagcgttcctccaattcgttggaaacagtatcctttcaccaacttcttaataactatcagctcacacgtgggtgttaactttacatgttattacgcctccagagcagcctttggcttacccttcgaaatgtctccgccatttacttttattctcgcttttatgaccgtaatgggaatgacaatagctttcgcgaaagacatttcagatatcgaaggtgatgcgaaatatggggtgtctactgttgctacgaagttaggtgcaagaaatatgacgtttgttgtcagtggtgtcttgttgctgacatacgtaagcgctatacttgcagctatcatttggccgcaagcctttaagtcaaatgtgatgttgttatctcatgccatcctggcgttctgcctaattttccaaactagagagctagcgcttgcaaattatgcttctgcacctagtaggcagttttttgaatttatctggaaattgcattatgcagagtacttagtttatgttttcatc

SEQ ID NO: 954 - DNA, 969 bp, Artificial Sequence
  Synthetic
atgtcagccgggagcgaccagatagaaggaagtcctcatcacgagtctgataactccattgcgacaaaaatcctgaatttcggtcatacgtgctggaagttacaaaggccctatgtcgtgaaaggtatgatttcgatagcttgtggcttgtttggtcgcgaactatttcataataccaaccttttatcttggtcattgatgctcaaggcattctcatccttaatggtaatcctttcttttaatttctacgctgccggaatgaatcaaatttacgatgttgatattgaccgaattaacaaaccagatttgccactcgttagtggagagatgagtatcgaaactgcatggatactatcgatcattgtcgctctgacaggcttaatattgactattaagcttaattgtggtccgctatttatatcattgtattgcgtatctattttcgctggaactgcatacagcgttcctccaattcgttggaaacagtatcctttcaccaacttcttaataactatcagctcacacgtgggtgttaactttacatgttattacgcctccagagcagcctttggcttacccttcgaaatgtctccgccatttacttttattctcgcttttatgaccgtaatgggaatgacaatagctttcgcgaaagacatttcagatatcgaaggtgatgcgaaatatggggtgtctactgttgctacgaagttaggtgcaagaaatatgacgtttgttgtcagtggtgtcttgttgctgacatacgtaagcgctatacttgcagctatcatttggccgcaagcctttaagtcaaatgtgatgttgttatctcatgccatcctggcgttctgcctaattttccaaactagagagctagcgcttgcaaattatgcttctgcacctagtaggcagttttttgaatttatctggaaattgcattatgcagagtacttagtttatgttttcatc

SEQ ID NO: 955 - DNA, 969 bp, Artificial Sequence
  Synthetic
atgtcagccgggagcgaccagatagaaggaagtcctcatcacgagtctgataactccattgcgacaaaaatcctgaatttcggtcatacgttttggaagttacaaaggccctatgtcgtgaaaggtatgatttcgatagcttgtggcttgtttggtcgcgaactatttcataataccaaccttttatcttggtcattgatgctcaaggcattctcatccttaatggtaatcctttcttttaatttctttgctgccgttatgaatcaaatttacgatgttgaaattgaccgaattaacaaaccagatttgccactcgttagtggagagatgagtatcgaaactgcatggatactatcgatcattgtcgctctgacaggcttaatattgactattaagcttaattgtggtccgctatttatatcattgtattgcgtatctattttcgctggatttgcatacagcgttcctccaattcgttggaaacagtatcctttcaccaacttcttaataactatcagctcacacgtgggtgttaactttacatgttattacgcctccagagcagcctttggcttacccttcgaaatgtctccgccatttacttttattctcgcttttatgaccgtaatgggaatgacaatagctttcgcgaaagacatttcagatatcgaaggtgatgcgaaatatggggtgtctactgttgctacgaagttaggtgcaagaaatatgacgcgtgttgtcagtggtgtcttgttgctgacatacgtaagcgctatacttgcagctatcatttggccgcaagcctttaagtcaaatgtgatgttgttatctcatgccatcctggcgttctgcctaattttccaaactagagagctagcgcttgcaaattatgcttctgcacctagtaggcagttttttgaatttatctggaaattgcattatgcagagtacttagtttatgttttcatc

SEQ ID NO: 956 - DNA, 969 bp, Artificial Sequence
  Synthetic
atgtcagccgggagcgaccagatagaaggaagtcctcatcacgagtctgataactccattgcgacaaaaatcctgaatttcggtcatacgtgctggaagttacaaaggccctatgtcgtgaaaggtatgatttcgatagcttgtggcttgtttggtcgcgaactatttcataataccaaccttttatcttggtcattgatgctcaaggcattctcatccttaatggtaatcctttcttttaatggatttgctgccataatgaatcaaatttacgatgttgatattgaccgaattaacaaaccagatttgccactcgttagtggagagatgagtatcgaaactgcatggatactatcgatcattgtcgctctgacaggcttaatattgactattaagcttaattgtggtccgctatttatatcattgtattgcgtatctattttcgctggatttgcatacagcgttcctccaattcgttggaaacagtatcctttcaccaacttcttaataactatcagctcacacgtgggtgttaactttacatgttattacgcctccagagcagcctttggcttacccttcgaaatgtctccgccatttacttttattctcgcttttatgaccgtaatgggaatgacaatagctttcgcgaaagacatttcagatatcgaaggtgatgcgaaatatggggtgtctactgttgctacgaagttaggtgcaagaaatatgacgagagttgtcagtggtgtcttgttgctgacatacgtaagcgctatacttgcagctatcatttggccgcaagcctttaagtcaaatgtgatgttgttatctcatgccatcctggcgttctgcctaattttccaaactagagagctagcgcttgcaaattatgcttctgcacctagtaggcagttttttgaatttatctggaaattgcattatgcagagtacttagtttatgttttcatc

SEQ ID NO: 957 - DNA, 969 bp, Artificial Sequence
  Synthetic
atgtccgcaggatcagatcaaatagaagggagcccccatcacgagtcggacaacagtatcgcgacaaaaattcttaattttggccatactttctggaagttacagcgtccttacgtagttaaaggtttgatttctatcgcttgcggtttgttcggtaaggaactactccacaatacgaacttgatatcatggtctttaatgtttaaagccttctttgctctggtcccaattctaagtttcaatggattcgcagccgtgatgaatcaaatctatgatgttgaaatagataggattaacaagccggatttaccactcgtgtccggagaaatgtctatagagacagcttggatcctgtcgattattgtcgctcttactggcttgatagttaccattaaaatgaaaggtggccctttatttgtgtttatctatatattgggtctattcgcaggttttgcttactctgtacctccaattcgatggaagcagtatccgttcactaactttttgatcaccatttcaagccatgttggactagccttcacatcctactatgcttctagagccgcgcttggtctaccatttgaactgcgcccctcatttagttttataattgcattcatgacagttatggggatgactattgcctttgcaaaggacatttcagatattgaaggagatgcaaaatatggtgtctctacggtagctactaaattaggtgctagaaatatgaccagggttgtgtcgggggtgttgctattaaattacttagtcagtattttggcaggaataatctggccccaagcttttaattcaaatgtcatgatcttatcgcacgcaattttggccttctgtctcatctttcaaacgagagaattagcccttgctaactacgcaagtgctccttcccgtcaatttttcgagtttatttggaacctgtattatgcggaatacctggtatacgttttcatt

SEQ ID NO: 958 - DNA, 969 bp, Artificial Sequence
  Synthetic
atgtcagccgggagcgaccagatagaaggaagtcctcatcacgagtctgataactccattgcgacaaaaatcctgaatttcggtcatacgtgctggaagttacaaaggccctatgtcgtgaaaggtatgatttcgatagcttgtggcttgtttggtcgcgaactatttcataataccaaccttttatcttggtcattgatgctcaaggcattctcatccttaatggtaatcctttcttttaatggatttgctgccataatgaatcaaatttacgatgttgaaattgaccgaattaacaaaccagatttgccactcgttagtggagagatgagtatcgaaactgcatggatactatcgatcattgtcgctctgacaggcttaatattgactattaagcttaattgtggtccgctatttatatcattgtattgcgtatctttgttcgctggatttgcatacagcgttcctccaattcgttggaaacagtatcctttcaccaacttcttaataactatcagctcacacgtgggtgttaactttacatgttattacgcctccagagcagcctttggcttacccttcgaaatgtctccgccatttacttttattctcgcttttatgaccgtaatgggaatgacaatagctttcgcgaaagacatttcagatatcgaaggtgatgcgaaatatggggtgtctactgttgctacgaagttaggtgcaagaaatatgacgtttgttgtcagtggtgtcttgttgctgacatacgtaagcgctatacttgcagctatcatttggccgcaagcctttaagtcaaatgtgatgttgttatctcatgccatcctggcgttctgcctaattttccaaactagagagctagcgcttgcaaattatgcttctgcacctagtaggcagttttttgaatttatctggaaattgcattatgcagagtacttagtttatgttttcatc

SEQ ID NO: 959 - DNA, 969 bp, Artificial Sequence
  Synthetic
atgtccgcaggatcagatcaaatagaagggagcccccatcacgagtcggacaacagtatcgcgacaaaaattcttaattttggccatactttctggaagttacagcgtccttacgtagttaaaggtctaatttctatcgcttgcggtttgttcggtaaggaactactccacaatacgaacttgatatcatggtctttaatgtttaaagccttctttgctctggtcccaattctaagtttcaattttttcgcagccagcgttaatcaaatctatgatgttgaaatagataggattaacaagccggatttaccactcgtgtccggagaaatgtctatagagacagcttggatcctgtcgattattgtcgctcttactggcttgatagttaccattaaaatgaaaggtggccctttatttgtgtttatctatatattaggtttgttcgcaggttttgcttactctgtacctccaattcgatggaagcagtatccgttcactaactttttgatcaccatttcaagccatgttggactagccttcacatcctactatgcttctagagccgcgcttggtctaccatttgaactgcgcccctcatttagttttataattgcattcatgacagttatggggatgactattgcctttgcaaaggacatttcagatattgaaggagatgcaaaatatggtgtctctacggtagctactaaattaggtgctagaaatatgaccagagttgtgtcgggggtgttgctattaaattacttagtcagtattttggcaggaataatctggccccaagcttttaattcaaatgtcatgatcttatcgcacgcaattttggccttctgtctcatctttcaaacgagagaattagcccttgctaactacgcaagtgctccttcccgtcaatttttcgagtttatttggagactgtattatgcggaatacctggtatacgttttcatt

SEQ ID NO: 960 - DNA, 969 bp, Artificial Sequence
  Synthetic
atgtccgcaggatcagatcaaatagaagggagcccccatcacgagtcggacaacagtatcgcgacaaaaattcttaattttggccatactttctggaagttacagcgtccttacgtagttaaaggtctgatttctatcgcttgcggtttgttcggtaaggaactactccacaatacgaacttgatatcatggtctttaatgtttaaagccttctttgctctggtcccaattctaagtttcaattttttcgcagccggcatgaatcaaatctatgatgttgagatagataggattaacaagccggatttaccactcgtgtccggagaaatgtctatacgcacagcttggatcctgtcgattattgtcgctcttactggcttgatagttaccattaaaatgaaaggtggccctttatttgtgtttatctatatatctggtatattcgcaggttttgcttactctgtacctccaattcgatggaagcagtatccgttcactaactttttgatcaccatttcaagccatgttggactagccttcacatcctactatgcttctagagccgcgcttggtctaccatttgaactgcgcccctcatttagttttataattgcattcatgacagttatggggatgactattgcctttgcaaaggacatttcagatattgaaggagatgcaaaatatggtgtctctacggtagctactaaattaggtgctagaaatatgaccttcgttgtgtcgggggtgttgctattaaattacttagtcagtattttggcaggaataatctggcccttcgcttttaattcaaatgtcatgatcttatcgcacgcaattttggccttctgtctcatctttagaacgagagaattagcccttgctaactacgcaagtgctccttcccgtcaatttttcgagtttatttggaatctgtattatgcggaatacctggtatacgttttcatt

SEQ ID NO: 961 - DNA, 969 bp, Artificial Sequence
  Synthetic
atgtcagccgggagcgaccagatagaaggaagtcctcatcacgagtctgataactccattgcgacaaaaatcctgaatttcggtcatacgtgctggaagttacaaaggccctatgtcgtgaaaggtatgatttcgatagcttgtggcttgtttggtcgcgaactatttcataataccaaccttttatcttggtcattgatgctcaaggcattctcatccttaatggtaatcctttcttttaatttctttgctgccggtatgaatcaaatttacgatgttgaaattgaccgaattaacaaaccagatttgccactcgttagtggagagatgagtatcgaaactgcatggatactatcgatcattgtcgctctgacaggcttaatattgactattaagcttaattgtggtccgctatttatatcattgtattgcgtatctttattcgctggatttgcatacagcgttcctccaattcgttggaaacagtatcctttcaccaacttcttaataactatcagctcacacgtgggtgttaactttacatgttattacgcctccagagcagcctttggcttacccttcgaaatgtctccgccatttacttttattctcgcttttatgaccgtaatgggaatgacaatagctttcgcgaaagacatttcagatatcgaaggtgatgcgaaatatggggtgtctactgttgctacgaagttaggtgcaagaaatatgacgagagttgtcagtggtgtcttgttgctgacatacgtaagcgctatacttgcagctatcatttggccgcaagcctttaagtcaaatgtgatgttgttatctcatgccatcctggcgttctgcctaattttccaaactagagagctagcgcttgcaaattatgcttctgcacctagtaggcagttttttgaatttatctggaaattgcattatgcagagtacttagtttatgttttcatc

SEQ ID NO: 962 - DNA, 969 bp, Artificial Sequence
  Synthetic
atgtccgcaggatcagatcaaatagaagggagcccccatcacgagtcggacaacagtatcgcgacaaaaattcttaattttggccatactttctggaagttacagcgtccttacgtagttaaaggtctaatttctatcgcttgcggtttgttcggtaaggaactactccacaatacgaacttgatatcatggtctttaatgtttaaagccttctttgctctggtcccaattctaagtttcaattttttcgcagcctctgttaatcaaatctatgatgttgaaatagataggattaacaagccggatttaccactcgtgtccggagaaatgtctatagagacagcttggatcctgtcgattattgtcgctcttactggcttgatagttaccattaaaatgaaaggtggccctttatttgtgtttatctatatattgggtctattcgcaggttttgcttactctgtacctccaattcgatggaagcagtatccgttcactaactttttgatcaccatttcaagccatgttggactagccttcacatcctactatgcttctagagccgcgcttggtctaccatttgaactgcgcccctcatttagttttataattgcattcatgacagttatggggatgactattgcctttgcaaaggacatttcagatattgaaggagatgcaaaatatggtgtctctacggtagctactaaattaggtgctagaaatatgaccagagttgtgtcgggggtgttgctattaaattacttagtcagtattttggcaggaataatctggccccaagcttttaattcaaatgtcatgatcttatcgcacgcaattttggccttctgtctcatctttcaaacgagagaattagcccttgctaactacgcaagtgctccttcccgtcaatttttcgagtttatttggaacctgtattatgcggaatacctggtatacgttttcatt

SEQ ID NO: 963 - DNA, 969 bp, Artificial Sequence
  Synthetic
atgtcagccgggagcgaccagatagaaggaagtcctcatcacgagtctgataactccattgcgacaaaaatcctgaatttcggtcatacgtgctggaagttacaaaggccctatgtcgtgaaaggtatgatttcgatagcttgtggcttgtttggtcgcgaactatttcataataccaaccttttatcttggtcattgatgctcaaggcattctcatccttaatggtaatcctttcttttaatttctacgctgccagcgttaatcaaatttacgatgttgatattgaccgaattaacaaaccagatttgccactcgttagtggagagatgagtatcgaaactgcatggatactatcgatcattgtcgctctgacaggcttaatattgactattaagcttaattgtggtccgctatttatatcattgtattgcgtatctattttcgctggaaccgcatacagcgttcctccaattcgttggaaacagtatcctttcaccaacttcttaataactatcagctcacacgtgggtgttaactttacatgttattacgcctccagagcagcctttggcttacccttcgaaatgtctccgccatttacttttattctcgcttttatgaccgtaatgggaatgacaatagctttcgcgaaagacatttcagatatcgaaggtgatgcgaaatatggggtgtctactgttgctacgaagttaggtgcaagaaatatgacgtttgttgtcagtggtgtcttgttgctgacatacgtaagcgctatacttgcagctatcatttggccgcaagcctttaagtcaaatgtgatgttgttatctcatgccatcctggcgttctgcctaattttccaaactagagagctagcgcttgcaaattatgcttctgcacctagtaggcagttttttgaatttatctggaaattgcattatgcagagtacttagtttatgttttcatc

SEQ ID NO: 964 - DNA, 969 bp, Artificial Sequence
  Synthetic
atgtcagccgggagcgaccagatagaaggaagtcctcatcacgagtctgataactccattgcgacaaaaatcctgaatttcggtcatacgtgctggaagttacaaaggccctatgtcgtgaaaggtatgatttcgatagcttgtggcttgtttggtcgcgaactatttcataataccaaccttttatcttggtcattgatgctcaaggcattctcatccttaatggtaatcctttcttttaatttctttgctgccgttattaatcaaatttacgatgttgatattgaccgaattaacaaaccagatttgccactcgttagtggagagatgagtatcgaaactgcatggatactagctatcattgtcgctctgacaggcttaatattgactattaagcttaattgtggtccgctatttatatcattgtattgcgtatctattttcgctggaaccgcatacagcgttcctccaattcgttggaaacagtatcctttcaccaacttcttaataactatcagctcacacgtgggtgttaactttacatgttattacgcctccagagcagcctttggcttacccttcgaaatgtctccgccatttacttttattctcgcttttatgaccgtaatgggaatgacaatagctttcgcgaaagacatttcagatatcgaaggtgatgcgaaatatggggtgtctactgttgctacgaagttaggtgcaagaaatatgacgtttgttgtcagtggtgtcttgttgctgacatacgtaagcgctatacttgcagctatcatttggccgcaagcctttaagtcaaatgtgatgttgttatctcatgccatcctggcgttctgcctaattttccaaactagagagctagcgcttgcaaattatgcttctgcacctagtaggcagttttttgaatttatctggaaattgcattatgcagagtacttagtttatgttttcatc

SEQ ID NO: 965 - DNA, 969 bp, Artificial Sequence
  Synthetic
atgtcagccgggagcgaccagatagaaggaagtcctcatcacgagtctgataactccattgcgacaaaaatcctgaatttcggtcatacgtgctggaagttacaaaggccctatgtcgtgaaaggtctaatttcgatagcttgtggcttgtttggtcgcgaactatttcataataccaaccttttatcttggtcattgatgctcaaggcattctcatccttaatggtaatcctttcttttaatttctttgctgccggcatgaatcaaatttacgatgttgaaattgaccgaattaacaaaccagatttgccactcgttagtggagagatgagtatcgaaactgcatggatactatcgatcattgtcgctctgacaggcttaatattgactattaagcttaattgtggtccgctatttatatcattgtattgcgtatctattttcgctggatttgcatacagcgttcctccaattcgttggaaacagtatcctttcaccaacttcttaataactatcagctcacacgtgggtgttaactttacatgttattacgcctccagagcagcctttggcttacccttcgaaatgtctccgccatttacttttattctcgcttttatgaccgtaatgggaatgacaatagctttcgcgaaagacatttcagatatcgaaggtgatgcgaaatatggggtgtctactgttgctacgaagttaggtgcaagaaatatgacgagagttgtcagtggtgtcttgttgctgacatacgtaagcgctatacttgcagctatcatttggccgcaagcctttaagtcaaatgtgatgttgttatctcatgccatcctggcgttctgcctaattttccaaactagagagctagcgcttgcaaattatgcttctgcacctagtaggcagttttttgaatttatctggaaattgcattatgcagagtacttagtttatgttttcatc

SEQ ID NO: 966 - DNA, 969 bp, Artificial Sequence
  Synthetic
atgtcagccgggagcgaccagatagaaggaagtcctcatcacgagtctgataactccattgcgacaaaaatcctgaatttcggtcatacgtgctggaagttacaaaggccctatgtcgtgaaaggtatgatttcgatagcttgtggcttgtttggtcgcgaactatttcataataccaaccttttatcttggtcattgatgctcaaggcattctcatccttaatggtaatcctttcttttaatggctttgctgccactatgaatcaaatttacgatgttgatattgaccgaattaacaaaccagatttgccactcgttagtggagagatgagtatcgaaactgcatggatactatcgatcattttcgctctgacaggcttaatattgactattaagcttaattgtggtccgctatttatatcattgtattgcgtatctattttcgctggatttgcatacagcgttcctccaattcgttggaaacagtatcctttcaccaacttcttaataactatcagctcacacgtgggtgttaactttacatgttattacgcctccagagcagcctttggcttacccttcgaaatgtctccgccatttacttttattctcgcttttatgaccgtaatgggaatgacaatagctttcgcgaaagacatttcagatatcgaaggtgatgcgaaatatggggtgtctactgttgctacgaagttaggtgcaagaaatatgacgtttgttgtcagtggtgtcttgttgctgacatacgtaagcgctatacttgcagctatcatttggccgcaagcctttaagtcaaatgtgatgttgttatctcatgccatcctggcgttctgcctaattttccaaactagagagctagcgcttgcaaattatgcttctgcacctagtaggcagttttttgaatttatctggaaattgcattatgcagagtacttagtttatgttttcatc

SEQ ID NO: 967 - DNA, 969 bp, Artificial Sequence
  Synthetic
atgtccgcaggatcagatcaaatagaagggagcccccatcacgagtcggacaacagtatcgcgacaaaaattcttaattttggccatactttctggaagttacagcgtccttacgtagttaaaggtatgatttctatcgcttgcggtttgttcggtaaggaactactccacaatacgaacttgatatcatggtctttaatgtttaaagccttctttgctctggtcccaattctaagtttcaattttttcgcagccattgttaatcaaatctatgatgttgaaatagataggattaacaagccggatttaccactcgtgtccggagaaatgtctatacgcacagcttggatcctgtcgattattgtcgctcttactggcttgatagttaccattaaaatgaaaggtggccctttatttgtgtttatctatataacaggtatattcgcaggttttgcttactctgtacctccaattcgatggaagcagtatccgttcactaactttttgatcaccatttcaagccatgttggactagccttcacatcctactatgcttctagagccgcgcttggtctaccatttgaactgcgcccctcatttagttttataattgcattcatgacagttatggggatgactattgcctttgcaaaggacatttcagatattgaaggagatgcaaaatatggtgtctctacggtagctactaaattaggtgctagaaatatgacctgggttgtgtcgggggtgttgctattaaattacttagtcagtattttggcaggaataatctggccctttgcttttaattcaaatgtcatgatcttatcgcacgcaattttggccttctgtctcatctttaggacgagagaattagcccttgctaactacgcaagtgctccttcccgtcaatttttcgagtttatttggaaactgtattatgcggaatacctggtatacgttttcatt

SEQ ID NO: 968 - DNA, 969 bp, Artificial Sequence
  Synthetic
atgtccgcaggatcagatcaaatagaagggagcccccatcacgagtcggacaacagtatcgcgacaaaaattcttaattttggccatactttctggaagttacagcgtccttacgtagttaaaggtgtgatttctatcgcttgcggtttgttcggtaaggaactactccacaatacgaacttgatatcatggtctttaatgtttaaagccttctttgctctggtcccaattctaagtttcaattttttcgcagccattatgaatcaaatctatgatgttgaaatagataggattaacaagccggatttaccactcgtgtccggagaaatgtctataagaacagcttggatcctgtcgattattgtcgctcttactggcttgatagttaccattaaaatgaaaggtggccctttatttgtgtttatctatatatttggtttgttcgcaggttttgcttactctgtacctccaattcgatggaagcagtatccgttcactaactttttgatcaccatttcaagccatgttggactagccttcacatcctactatgcttctagagccgcgcttggtctaccatttgaactgcgcccctcatttagttttataattgcattcatgacagttatggggatgactattgcctttgcaaaggacatttcagatattgaaggagatgcaaaatatggtgtctctacggtagctactaaattaggtgctagaaatatgacctgggttgtgtcgggggtgttgctattaaattacttagtcagtattttggcaggaataatctggccctttgcttttaattcaaatgtcatgatcttatcgcacgcaattttggccttctgtctcatctttaggacgagagaattagcccttgctaactacgcaagtgctccttcccgtcaatttttcgagtttatttggagactgtattatgcggaatacctggtatacgttttcatt

SEQ ID NO: 969 - DNA, 969 bp, Artificial Sequence
  Synthetic
atgtccgcaggatcagatcaaatagaagggagcccccatcacgagtcggacaacagtatcgcgacaaaaattcttaattttggccatacttgttggaagttacagcgtccttacgtagttaaaggtctaatttctatcgcttgcggtttgttcggtaaggaactactccacaatacgaacttgatatcatggtctttaatgtttaaagccttctttgctctggtcccaattctaagtttcaatgggttcgcagccattatgaatcaaatctatgatgttgagatagataggattaacaagccggatttaccactcgtgtccggagaaatgtctataagaacagcttggatcctgtcgattattgtcgctcttactggcttgatagttaccattaaaatgaaaggtggccctttatttgtgtttatctatatatttggtttgttcgcaggttttgcttactctgtacctccaattcgatggaagcagtatccgttcactaactttttgatcaccatttcaagccatgttggactagccttcacatcctactatgcttctagagccgcgcttggtctaccatttgaactgcgcccctcatttagttttataattgcattcatgacagttatggggatgactattgcctttgcaaaggacatttcagatattgaaggagatgcaaaatatggtgtctctacggtagctactaaattaggtgctagaaatatgaccagggttgtgtcgggggtgttgctattaaattacttagtcagtattttggcaggaataatctggcccttcgcttttaattcaaatgtcatgatcttatcgcacgcaattttggccttctgtctcatctttagaacgagagaattagcccttgctaactacgcaagtgctccttcccgtcaatttttcgagtttatttggaaactgtattatgcggaatacctggtatacgttttcatt

SEQ ID NO: 970 - DNA, 969 bp, Artificial Sequence
  Synthetic
atgtcagccgggagcgaccagatagaaggaagtcctcatcacgagtctgataactccattgcgacaaaaatcctgaatttcggtcatacgttttggaagttacaaaggccctatgtcgtgaaaggtctaatttcgatagcttgtggcttgtttggtcgcgaactatttcataataccaaccttttatcttggtcattgatgctcaaggcattctcatccttaatggtaatcctttcttttaatttctttgctgccagtatgaatcaaatttacgatgttgagattgaccgaattaacaaaccagatttgccactcgttagtggagagatgagtatcgaaactgcatggatactatcgatcattgtcgctctgacaggcttaatattgactattaagcttaattgtggtccgctatttatatcattgtattgcgtatctattttcgctggatttgcatacagcgttcctccaattcgttggaaacagtatcctttcaccaacttcttaataactatcagctcacacgtgggtgttaactttacatgttattacgcctccagagcagcctttggcttacccttcgaaatgtctccgccatttacttttattctcgcttttatgaccgtaatgggaatgacaatagctttcgcgaaagacatttcagatatcgaaggtgatgcgaaatatggggtgtctactgttgctacgaagttaggtgcaagaaatatgacgtttgttgtcagtggtgtcttgttgctgacatacgtaagcgctatacttgcagctatcatttggccgcaagcctttaagtcaaatgtgatgttgttatctcatgccatcctggcgttctgcctaattttccaaactagagagctagcgcttgcaaattatgcttctgcacctagtaggcagttttttgaatttatctggaaattgcattatgcagagtacttagtttatgttttcatc

SEQ ID NO: 971 - DNA, 969 bp, Artificial Sequence
  Synthetic
atgtcagccgggagcgaccagatagaaggaagtcctcatcacgagtctgataactccattgcgacaaaaatcctgaatttcggtcatacgttttggaagttacaaaggccctatgtcgtgaaaggtatgatttcgatagcttgtggcttgtttggtcgcgaactatttcataataccaaccttttatcttggtcattgatgctcaaggcattctcatccttaatggtaatcctttcttttaatggctttgctgccataatgaatcaaatttacgatgttgatattgaccgaattaacaaaccagatttgccactcgttagtggagagatgagtatcgaaactgcatggatactatcgatcattgtcgctctgacaggcttaatattgactattaagcttaattgtggtccgctatttatatcattgtattgcgtatctttattcgctggatttgcatacagcgttcctccaattcgttggaaacagtatcctttcaccaacttcttaataactatcagctcacacgtgggtgttaactttacatgttattacgcctccagagcagcctttggcttacccttcgaaatgtctccgccatttacttttattctcgcttttatgaccgtaatgggaatgacaatagctttcgcgaaagacatttcagatatcgaaggtgatgcgaaatatggggtgtctactgttgctacgaagttaggtgcaagaaatatgacgtttgttgtcagtggtgtcttgttgctgacatacgtaagcgctatacttgcagctatcatttggccgcaagcctttaagtcaaatgtgatgttgttatctcatgccatcctggcgttctgcctaattttccaaactagagagctagcgcttgcaaattatgcttctgcacctagtaggcagttttttgaatttatctggaaattgcattatgcagagtacttagtttatgttttcatc

SEQ ID NO: 972 - DNA, 969 bp, Artificial Sequence
  Synthetic
atgtcagccgggagcgaccagatagaaggaagtcctcatcacgagtctgataactccattgcgacaaaaatcctgaatttcggtcatacgttttggaagttacaaaggccctatgtcgtgaaaggtatgatttcgatagcttgtggcttgtttggtcgcgaactatttcataataccaaccttttatcttggtcattgatgctcaaggcattctcatccttaatggtaatcctttcttttaatggatttgctgccataatgaatcaaatttacgatgttgagattgaccgaattaacaaaccagatttgccactcgttagtggagagatgagtatcgaaactgcatggatactatcgatcattgtcgctctgacaggcttaatattgactattaagcttaattgtggtccgctatttatatcattgtattgcgtatctattttcgctggatttgcatacagcgttcctccaattcgttggaaacagtatcctttcaccaacttcttaataactatcagctcacacgtgggtgttaactttacatgttattacgcctccagagcagcctttggcttacccttcgaaatgtctccgccatttacttttattctcgcttttatgaccgtaatgggaatgacaatagctttcgcgaaagacatttcagatatcgaaggtgatgcgaaatatggggtgtctactgttgctacgaagttaggtgcaagaaatatgacgtttgttgtcagtggtgtcttgttgctgacatacgtaagcgctatacttgcagctatcatttggccgcaagcctttaagtcaaatgtgatgttgttatctcatgccatcctggcgttctgcctaattttccaaactagagagctagcgcttgcaaattatgcttctgcacctagtaggcagttttttgaatttatctggaaattgcattatgcagagtacttagtttatgttttcatc

SEQ ID NO: 973 - DNA, 969 bp, Artificial Sequence
  Synthetic
atgtcagccgggagcgaccagatagaaggaagtcctcatcacgagtctgataactccattgcgacaaaaatcctgaatttcggtcatacgttttggaagttacaaaggccctatgtcgtgaaaggtttgatttcgatagcttgtggcttgtttggtcgcgaactatttcataataccaaccttttatcttggtcattgatgctcaaggcattctcatccttaatggtaatcctttcttttaatttctttgctgccataatgaatcaaatttacgatgttgagattgaccgaattaacaaaccagatttgccactcgttagtggagagatgagtatcgaaactgcatggatactatcgatcattgtcgctctgacaggcttaatattgactattaagcttaattgtggtccgctatttatatcattgtattgcgtatctattttcgctggatttgcatacagcgttcctccaattcgttggaaacagtatcctttcaccaacttcttaataactatcagctcacacgtgggtgttaactttacatgttattacgcctccagagcagcctttggcttacccttcgaaatgtctccgccatttacttttattctcgcttttatgaccgtaatgggaatgacaatagctttcgcgaaagacatttcagatatcgaaggtgatgcgaaatatggggtgtctactgttgctacgaagttaggtgcaagaaatatgacgagagttgtcagtggtgtcttgttgctgacatacgtaagcgctatacttgcagctatcatttggccgcaagcctttaagtcaaatgtgatgttgttatctcatgccatcctggcgttctgcctaattttccaaactagagagctagcgcttgcaaattatgcttctgcacctagtaggcagttttttgaatttatctggaaattgcattatgcagagtacttagtttatgttttcatc

SEQ ID NO: 974 - DNA, 969 bp, Artificial Sequence
  Synthetic
atgtcagccgggagcgaccagatagaaggaagtcctcatcacgagtctgataactccattgcgacaaaaatcctgaatttcggtcatacgtgctggaagttacaaaggccctatgtcgtgaaaggtatgatttcgatagcttgtggcttgtttggtcgcgaactatttcataataccaaccttttatcttggtcattgatgctcaaggcattctcatccttaatggtaatcctttcttttaatttctttgctgccgcagttaatcaaatttacgatgttgatattgaccgaattaacaaaccagatttgccactcgttagtggagagatgagtatcgaaactgcatggatactatcgatcattgtcgctctgacaggcttaatattgactattaagcttaattgtggtccgctatttatatcattgtattgcgtatctattttcgctggatttgcatacagcgttcctccaattcgttggaaacagtatcctttcaccaacttcttaataactatcagctcacacgtgggtgttaactttacatgttattacgcctccagagcagcctttggcttacccttcgaaatgtctccgccatttacttttattctcgcttttatgaccgtaatgggaatgacaatagctttcgcgaaagacatttcagatatcgaaggtgatgcgaaatatggggtgtctactgttgctacgaagttaggtgcaagaaatatgacgtttgttgtcagtggtgtcttgttgctgacatacgtaagcgctatacttgcagctatcatttggccgcaagcctttaagtcaaatgtgatgttgttatctcatgccatcctggcgttctgcctaattttccaaactagagagctagcgcttgcaaattatgcttctgcacctagtaggcagttttttgaatttatctggaaattgcattatgcagagtacttagtttatgttttcatc

SEQ ID NO: 975 - DNA, 969 bp, Artificial Sequence
  Synthetic
atgtcagccgggagcgaccagatagaaggaagtcctcatcacgagtctgataactccattgcgacaaaaatcctgaatttcggtcatacgtgctggaagttacaaaggccctatgtcgtgaaaggtatgatttcgatagcttgtggcttgtttggtcgcgaactatttcataataccaaccttttatcttggtcattgatgctcaaggcattctcatccttaatggtaatcctttcttttaatttctttgctgccactgttaatcaaatttacgatgttgatattgaccgaattaacaaaccagatttgccactcgttagtggagagatgagtatcgaaactgcatggatactatcgatcattgtcgctctgacaggcttaatattgactattaagcttaattgtggtccgctatttatatcattgtattgcgtatctattttcgctggaggcgcatacagcgttcctccaattcgttggaaacagtatcctttcaccaacttcttaataactatcagctcacacgtgggtgttaactttacatgttattacgcctccagagcagcctttggcttacccttcgaaatgtctccgccatttacttttattctcgcttttatgaccgtaatgggaatgacaatagctttcgcgaaagacatttcagatatcgaaggtgatgcgaaatatggggtgtctactgttgctacgaagttaggtgcaagaaatatgacgtttgttgtcagtggtgtcttgttgctgacatacgtaagcgctatacttgcagctatcatttggccgcaagcctttaagtcaaatgtgatgttgttatctcatgccatcctggcgttctgcctaattttccaaactagagagctagcgcttgcaaattatgcttctgcacctagtaggcagttttttgaatttatctggaaattgcattatgcagagtacttagtttatgttttcatc

SEQ ID NO: 976 - DNA, 969 bp, Artificial Sequence
  Synthetic
atgtcagccgggagcgaccagatagaaggaagtcctcatcacgagtctgataactccattgcgacaaaaatcctgaatttcggtcatacgttttggaagttacaaaggccctatgtcgtgaaaggtatgatttcgatagcttgtggcttgtttggtcgcgaactatttcataataccaaccttttatcttggtcattgatgctcaaggcattctcatccttaatggtaatcctttcttttaatttctttgctgccgttgttaatcaaatttacgatgttgatattgaccgaattaacaaaccagatttgccactcgttagtggagagatgagtatcgaaactgcatggatactatcgatcattgtcgctctgacaggcttaatattgactattaagcttaattgtggtccgctatttatatcattgtattgcgtatctctgttcgctggatttgcatacagcgttcctccaattcgttggaaacagtatcctttcaccaacttcttaataactatcagctcacacgtgggtgttaactttacatgttattacgcctccagagcagcctttggcttacccttcgaaatgtctccgccatttacttttattctcgcttttatgaccgtaatgggaatgacaatagctttcgcgaaagacatttcagatatcgaaggtgatgcgaaatatggggtgtctactgttgctacgaagttaggtgcaagaaatatgacgtttgttgtcagtggtgtcttgttgctgacatacgtaagcgctatacttgcagctatcatttggccgcaagcctttaagtcaaatgtgatgttgttatctcatgccatcctggcgttctgcctaattttccaaactagagagctagcgcttgcaaattatgcttctgcacctagtaggcagttttttgaatttatctggaaattgcattatgcagagtacttagtttatgttttcatc

SEQ ID NO: 977 - DNA, 969 bp, Artificial Sequence
  Synthetic
atgtccgcaggatcagatcaaatagaagggagcccccatcacgagtcggacaacagtatcgcgacaaaaattcttaattttggccatactttctggaagttacagcgtccttacgtagttaaaggtatgatttcttgtgcttgcggtttgttcggtaaggaactactccacaatacgaacttgatatcatggtctttaatgtttaaagccttctttgctctggtcccaattctaagtttcaattttttcgcagcctctatgaatcaaatctatgatgttgaaatagataggattaacaagccggatttaccactcgtgtccggagaaatgtctatagagacagcttggatcctgtcgattattgtcgctcttactggcttgatagttaccattaaaatgaaaggtggccctttatttgtgtttatctatataagcggtatattcgcaggttttgcttactctgtacctccaattcgatggaagcagtatccgttcactaactttttgatcaccatttcaagccatgttggactagccttcacatcctactatgcttctagagccgcgcttggtctaccatttgaactgcgcccctcatttagttttataattgcattcatgacagttatggggatgactattgcctttgcaaaggacatttcagatattgaaggagatgcaaaatatggtgtctctacggtagctactaaattaggtgctagaaatatgacctgggttgtgtcgggggtgttgctattaaattacttagtcagtattttggcaggaataatctggccctttgcttttaattcaaatgtcatgatcttatcgcacgcaattttggccttctgtctcatctttagaacgagagaattagcccttgctaactacgcaagtgctccttcccgtcaatttttcgagtttatttggaggctgtattatgcggaatacctggtatacgttttcatt

SEQ ID NO: 978 - DNA, 969 bp, Artificial Sequence
  Synthetic
atgtccgcaggatcagatcaaatagaagggagcccccatcacgagtcggacaacagtatcgcgacaaaaattcttaattttggccatactttctggaagttacagcgtccttacgtagttaaaggtatgatttcttgcgcttgcggtttgttcggtaaggaactactccacaatacgaacttgatatcatggtctttaatgtttaaagccttctttgctctggtcccaattctaagtttcaattttttcgcagccgccatgaatcaaatctatgatgttgaaatagataggattaacaagccggatttaccactcgtgtccggagaaatgtctatagagacagcttggatcctgtcgattattgtcgctcttactggcttgatagttaccattaaaatgaaaggtggccctttatttgtgtttatctatatatttggtttgttcgcaggttttgcttactctgtacctccaattcgatggaagcagtatccgttcactaactttttgatcaccatttcaagccatgttggactagccttcacatcctactatgcttctagagccgcgcttggtctaccatttgaactgcgcccctcatttagttttataattgcattcatgacagttatggggatgactattgcctttgcaaaggacatttcagatattgaaggagatgcaaaatatggtgtctctacggtagctactaaattaggtgctagaaatatgacccgggttgtgtcgggggtgttgctattaaattacttagtcagtattttggcaggaataatctggccctttgcttttaattcaaatgtcatgatcttatcgcacgcaattttggccttctgtctcatctttagaacgagagaattagcccttgctaactacgcaagtgctccttcccgtcaatttttcgagtttatttggaaactgtattatgcggaatacctggtatacgttttcatt

SEQ ID NO: 979 - DNA, 969 bp, Artificial Sequence
  Synthetic
atgtccgcaggatcagatcaaatagaagggagcccccatcacgagtcggacaacagtatcgcgacaaaaattcttaattttggccatactttctggaagttacagcgtccttacgtagttaaaggtgtgatttctatcgcttgcggtttgttcggtaaggaactactccacaatacgaacttgatatcatggtctttaatgtttaaagccttctttgctctggtcccaattctaagtttcaattttttcgcagccattgttaatcaaatctatgatgttgaaatagataggattaacaagccggatttaccactcgtgtccggagaaatgtctatacgaacagcttggatcctgtcgattattgtcgctcttactggcttgatagttaccattaaaatgaaaggtggccctttatttgtgtttatctatataagcggtatattcgcaggttttgcttactctgtacctccaattcgatggaagcagtatccgttcactaactttttgatcaccatttcaagccatgttggactagccttcacatcctactatgcttctagagccgcgcttggtctaccatttgaactgcgcccctcatttagttttataattgcattcatgacagttatggggatgactattgcctttgcaaaggacatttcagatattgaaggagatgcaaaatatggtgtctctacggtagctactaaattaggtgctagaaatatgaccttcgttgtgtcgggggtgttgctattaaattacttagtcagtattttggcaggaataatctggccctttgcttttaattcaaatgtcatgatcttatcgcacgcaattttggccttctgtctcatctttagaacgagagaattagcccttgctaactacgcaagtgctccttcccgtcaatttttcgagtttatttggcggctgtattatgcggaatacctggtatacgttttcatt

SEQ ID NO: 980 - DNA, 969 bp, Artificial Sequence
  Synthetic
atgtcagccgggagcgaccagatagaaggaagtcctcatcacgagtctgataactccattgcgacaaaaatcctgaatttcggtcatacgtgctggaagttacaaaggccctatgtcgtgaaaggtatgatttcgatagcttgtggcttgtttggtcgcgaactatttcataataccaaccttttatcttggtcattgatgctcaaggcattctcatccttaatggtaatcctttcttttaatttctttgctgccgttatgaatcaaatttacgatgttgaaattgaccgaattaacaaaccagatttgccactcgttagtggagagatgagtatcgaaactgcatggatactatcgatcattgtcgctctgacaggcttaatattgactattaagcttaattgtggtccgctatttatatcattgtattgcgtatctctgttcgctggatttgcatacagcgttcctccaattcgttggaaacagtatcctttcaccaacttcttaataactatcagctcacacgtgggtgttaactttacatgttattacgcctccagagcagcctttggcttacccttcgaaatgtctccgccatttacttttattctcgcttttatgaccgtaatgggaatgacaatagctttcgcgaaagacatttcagatatcgaaggtgatgcgaaatatggggtgtctactgttgctacgaagttaggtgcaagaaatatgacgagagttgtcagtggtgtcttgttgctgacatacgtaagcgctatacttgcagctatcatttggccgcaagcctttaagtcaaatgtgatgttgttatctcatgccatcctggcgttctgcctaattttccaaactagagagctagcgcttgcaaattatgcttctgcacctagtaggcagttttttgaatttatctggaaattgcattatgcagagtacttagtttatgttttcatc

SEQ ID NO: 981 - skipped

SEQ ID NO: 982 - protein, 323 aa, Artificial Sequence
  Synthetic
MSAGSDQIEGSPHHESDNSIATKILNFGHACWKFQRPYVVKGLILIACGLFGKELLHNTNLISWSLMFKAFFALVPILSFNFFAAAINQIYDVEIDRINKPDLPLVSGEMSIRTAWILSIIVALTGLIVTIKMKGGPLFIFLYIFGLFLGFAYSVPPIRWKQYPFTNFLITISSHVGLAFTVYYASRAALGLPFELRPSFSFIIAFMTVMSITIAFAKDISDIEGDAKYGVSTLATKLGAKNMTRVVSGLLLLNYVVAILAGINWPFAFNSNVMILSHAILAFCLIFRTRELALANYASAPSRQFFEFIWNLYYAEYLVYVFI

SEQ ID NO: 983 - protein, 323 aa, Artificial Sequence
  Synthetic
MSAGSDQIEGSPHHESDNSIATKILNFGHTCWKLQRPYVVKGMISIACGLFGRELFHNTNLLSWSLMLKAFSSLMVILSFNGFAAIMNQIYDVEIDRINKPDLPLVSGEMSIETAWILSIIVALTGLILTIKLNCGPLFISLYCVSLFAGFAYSVPPIRWKQYPFTNFLITISSHVGVNFTCYYASRAAFGLPFEMSPPFTFILAFMTVMGMTIAFAKDISDIEGDRKYGVSTVATKLGARNMTFVVSGVLLLTYVSAILAAIIWPQAFKSNVMLLSHAILAFCLIFQTRELALANYASAPSRQFFEFIWKLHYAEYLVYVFI

SEQ ID NO: 984 - protein, 323 aa, Artificial Sequence
  Synthetic
MSAGSDQIEGSPHHESDNSIATKILNFGHTCWKLQRPYTVKGMISIACGLFGRELFHNTNLLSWSLMLKAFSSLMVILSFNGFAAIMNQIYDVEIDRINKPDLPLVSGEMSIETAWILSIIVALTGLILTIKLNCGPLFISLYCVSLFAGFAYSVPPIRWKQYPFTNFLITISSHVGVNFTCYYASRAAFGLPFEMSPPFTFILAFMTVMGMTIAFAKDISDIEGDAKYGVSTVATKLGARNMTFVVSGVLLLTYVSAILAAIIWPQAFKSNVMLLSHAILAFCLIFQTRELALANYASAPSRQFFEFIWKLHYAEYLVYVFI

SEQ ID NO: 985 - protein, 323 aa, Artificial Sequence
  Synthetic
MSAGSDQIEGSPHHESDNSIATKILNFGHTCWKLQRPYVVKGMISIACGLFGRELFHNTNLLSWSLMLKAFSSLMVILSFNGFAAIMNQIYDVEIDRINKPDLPLVSGEMSIETAWILSIIVALTGLILTIKLNCGPLFTSLYCVSLFAGFAYSVPPIRWKQYPFTNFLITISSHVGVNFTCYYASRAAFGLPFEMSPPFTFILAFMTVMGMTIAFAKDISDIEGDAKYGVSTVATKLGARNMTFVVSGVLLLTYVSAILAAIIWPQAFKSNVMLLSHAILAFCLIFQTRELALANYASAPSRQFFEFIWKLHYAEYLVYVFI

SEQ ID NO: 986 - protein, 323 aa, Artificial Sequence
  Synthetic
MSAGSDQIEGSPHHESDNSIATKILNFGHTCWKLQRPYVVKGMISIACGLFGRELFHNTNLLSWSLMLKAFSSLMVILSFNGFAAIMNQIYDVEIDRINKPDLPLVSGEMSIETAWILSIIVALTGLILTIKLNCGPLFISLYCVSLFAGFAYSVPPIRWKQYPFTNFLITISSHVGVNFTCYYASRAAFGLPFEMSPPFTFILAFMTVMGMTIAFAKDISDIEGDAKYGVSTVATKLGARNMTFLVSGVLLLTYVSAILAAIIWPQAFKSNVMLLSHAILAFCLIFQTRELALANYASAPSRQFFEFIWKLHYAEYLVYVFI

SEQ ID NO: 987 - protein, 323 aa, Artificial Sequence
  Synthetic
MSAGSDQIEGSPHHESDNSIATKILNFGHTCWKLQRPYVVKGMISIACGLFGRELFHNTNLLSWSLMLKAFSSLMVILSFNGFAAIMNQIYDVEIDRINKPDLPLVSGEMSIETAWILSIIVALTGLILTIKLNCGPLFISLYCVSLFAGFAYSVPPIRWKQYPFTNFLITISSHVGVNFTCYYASRAAFGLPFEMSPPFTFILAFMTVMGMTIAFAKDISDIEGDAKYGVSTVATKLGARNMTFVVSGVLLLTYVSAILAGIIWPQAFKSNVMLLSHAILAFCLIFQTRELALANYASAPSRQFFEFIWKLHYAEYLVYVFI

SEQ ID NO: 988 - protein, 323 aa, Artificial Sequence
  Synthetic
MSAGSDQIEGSPHHESDNSIATKILNFGHTCWKLQRPYVVKGMISIACGLFGRELFHNTNLLSWSLMLKAFSSLMVILSFNGFAAIMNQIYDVEIDRINKPDLPLVSGEMSIETAWILSIIVALTGLILTIKLNCGPLFISLYCVSLFAGFAYSVPPIRWKQYPFTNFLITISSHVGVNFTCYYASRAAFGLPFEMSPPFTFILAFMTVMGMTIAFAKDISDIEGDKKYGVSTVATKLGARNMTFVVSGVLLLNYVSAILAAIIWPQAFKSNVMLLSHAILAFCLIFQTRELALANYASAPSRQFFEFIWKLHYAEYLVYVFI

SEQ ID NO: 989 - protein, 323 aa, Artificial Sequence
  Synthetic
MSAGSDQIEGSPHHESDNSIATKILNFGHTCWKLQRPYVVKGMISIACGLFGRELFHNTNLLSWSLMLKAFSSLMVILSFNGFAAIMNQIYDVEIDRINKPDLPLVSGEMSIETAWILSIIVALTGLILTIKLNCGPLFISLYCVSLFAGFAYSVPPIRWKQYPFTNFLITISSHVGVNFTCYYASRAAFGLPFEMSPPFTFIIAFMTVMGMTIAFAKDISDIEGDAKYGVSTVATKLGARNMTFVVSGVLLLTYVSAILAAIIWPQAFKSNVMLLSHAILAFCLIFQTRELALANYASAPSRQFFEFIWKLHYAEYLVYVFI

SEQ ID NO: 990 - protein, 323 aa, Artificial Sequence
  Synthetic
MSAGSDQIEGSPHHESDNSIATKILNFGHTCWKLQRPYVVKGMISIACGLFGRELFHNTNLLSWSLMLKAFSSLVVILSFNGFAAIMNQIYDVEIDRINKPDLPLVSGEMSIETAWILSIIVALTGLILTIKLNCGPLFISLYCVSLFAGFAYSVPPIRWKQYPFTNFLITISSHVGVNFTCYYASRAAFGLPFEMSPPFTFILAFMTVMGMTIAFAKDISDIEGDAKYGVSTVATKLGARNMTFVVSGVLLLNYVSAILAAIIWPQAFKSNVMLLSHAILAFCLIFQTRELALANYASAPSRQFFEFIWKLHYAEYLVYVFI

SEQ ID NO: 991 - protein, 323 aa, Artificial Sequence
  Synthetic
MSAGSDQIEGSPHHESDNSIATKILNFGHTCWKLQRPYVVKGMISIACGLFGRELFHNTNLLSWSLMLKAFSSLMVILSFNGFAAIMNQIYDVEIDRINKPDLPLVSGEMSIETAWILSIIVALTGLILTIKLNCGPLFISLYCVSLFAGFAYSVPPIRWKQYPFTNFLITISSHVGVNFTCYYASRAAFGLPFEMSPPFTFILAFMTVMGMTIAFAKDISDIEGDAKYGVSTVATKLGARNMTFVVSGVLLLLYVSAILAAIIWPQAFKSNVMLLSHAILAFCLIFQTRELALANYASAPSRQFFEFIWKLHYAEYLVYVFI

SEQ ID NO: 992 - protein, 323 aa, Artificial Sequence
  Synthetic
MSAGSDQIEGSPHHESDNSIATKILNFGHTCWKLQRPYVVKGMISIACGLFGRELFHNTNLLSWSLMLKAFSSLMVILSFNGFAAIMNQIYDVEIDRINKPDLPLVSGEMSIETAWILSIIVALTGLILTIKLNCGPLFISLYCVSLFAGFAYSVPPIRWKQYPFTNFLITISSHVGVNFTCYYASRAAFGLPFEMSPPFTFILAFMTVMGMTIAFAKDISDIEGDAKYGVSTVATKLGARNMTFVVSGVLLLNYVSAILAAIIWPQAFKSNVMLLSHAILAFCLIFQTRELALANYASAPSRQFFEFIWKLHYAEYLVYVFI

SEQ ID NO: 993 - protein, 323 aa, Artificial Sequence
  Synthetic
MSAGSDQIEGSPHHESDNSIATKILNFGHACWKLQRPYVVKGLISIACGLFGKELLHNTNLISWSLMFKAFFALVPILSFNFFAAAMNQIYDVEIDRINKPDLPLVSGEMSIRTAWILSISVALTGLIITIKMKGGPLFVSIYIFGLLLGFAYSVPPIRWKQYPFTNFLIIILSHVGLAFTVYYASRAALGLPFELRPSFSFIIAFMTVMSLVIAFAKDISDIEGDAKYGVSTVATKLGAKNMTRVCSGLLLLNYLVSILAGIIWPFAFNSNVMILSHAILAFCLFFRTRELALANYASAPSRQFFEFIWNLYYAEYLVYVFI

SEQ ID NO: 994 - protein, 323 aa, Artificial Sequence
  Synthetic
MSAGSDQIEGSPHHESDNSIATKILNFGHTCWKLQRPYVVKGMISIACGLFGRELFHNTNLISWSLMLKAFSSLMVILSFNGFAAIMNQIYDVEIDRINKPDLPLVSGEMSIETAWILSIIVALTGLILTIKLNCGPLFISLYCVSLFAGFAYSVPPIRWKQYPFTNFLITISSHVGVNFTCYYASRAAFGLPFEMSPPFTFILAFMTVMGMTIAFAKDISDIEGDAKYGVSTVATKLGARNMTFVVSGVLLLTYVSAILAAIIWPQAFKSNVMLLSHAILAFCLIFQTRELALANYASAPSRQFFEFIWKLHYAEYLVYVFI

SEQ ID NO: 995 - protein, 323 aa, Artificial Sequence
  Synthetic
MSAGSDQIEGSPHHESDNSIATKILNFGHTCWKLQRPYVVKGMISIACGLFGRELFHNTNLLSWSLMFKAFSSLMVILSFNGFAAIMNQIYDVEIDRINKPDLPLVSGEMSIETAWILSIIVALTGLILTIKLNCGPLFISLYCVSLFAGFAYSVPPIRWKQYPFTNFLITISSHVGVNFTCYYASRAAFGLPFEMSPPFTFILAFMTVMGMTIAFAKDISDIEGDAKYGVSTVATKLGARNMTFVVSGVLLLTYVSAILAAIIWPQAFKSNVMLLSHAILAFCLIFQTRELALANYASAPSRQFFEFIWKLHYAEYLVYVFI

SEQ ID NO: 996 - protein, 323 aa, Artificial Sequence
  Synthetic
MSAGSDQIEGSPHHESDNSIATKILNFGHTCWKLQRPYVVKGMISIACGLFGRELFHNTNLLSWSLMLKAFSSLMVILSFNGFAAIMNQIYDVEIDRINKPDLPLVSGEMSIETAWILSIIVALTGLILTIKLNCGPLFISLYCVSLFAGFAYSVPPIRWKQYPFTNFLITISSHVGVNFTCYYASRAAFGLPFEMSPPFTFILAFMTVMGMTIAFAKDISDIEGDAKYGVSTVATKLGARNMTFVVSGVLLLNYVGAILAAIIWPQAFKSNVMLLSHAILAFCLIFQTRELALANYASAPSRQFFEFIWKLHYAEYLVYVFI

SEQ ID NO: 997 - protein, 323 aa, Artificial Sequence
  Synthetic
MSAGSDQIEGSPHHESDNSIATKILNFGHTCWKLQRPYVVKGMISIACGLFGRELFHNTNLLSWSLMLKAFSSLMVILSFNGFAAIMNQIYDVEIDRINKPDLPLVSGEMSIETAWILSIIVALTGLILTIKLNCGPLFISLYCVSLFAGFAYSVPPIRWKQYPFTNFLITFSSHVGVNFTCYYASRAAFGLPFEMSPPFTFILAFMTVMGMTIAFAKDISDIEGDAKYGVSTVATKLGARNMTFVVSGVLLLTYVSAILAAIIWPQAFKSNVMLLSHAILAFCLIFQTRELALANYASAPSRQFFEFIWKLHYAEYLVYVFI

SEQ ID NO: 998 - protein, 323 aa, Artificial Sequence
  Synthetic
MSAGSDQIEGSPHHESDNSIATKILNFGHTCWKLQRPYVVKGMISIACGLFGRELFHNTNLLSWSLMLKAFSSLMVILSFNGFAAIMNQIYDVEIDRINKPDLPLVSGEMSIETAWILSIIVALTGLILTIKLNCGPLFISLYCVSLFAGFAYSVPPIRWKQYPFTNFLITISSHVGVNFTCYYASRAAFGLPFEMSPPFTFILAFMTVMGMVIAFAKDISDIEGDAKYGVSTVATKLGARNMTFVVSGVLLLNYVSAILAAIIWPQAFKSNVMLLSHAILAFCLIFQTRELALANYASAPSRQFFEFIWKLHYAEYLVYVFI

SEQ ID NO: 999 - protein, 323 aa, Artificial Sequence
  Synthetic
MSAGSDQIEGSPHHESDNSIATKILNFGHTCWKLQRPYVVKGMISIACGLFGRELFHNTNLLSWSLMLKAFSSLMVILSFNGFAAIMNQIYDVEIDRINKPDLPLVSGEMSIETAWILSIIVALTGLILTIKLNCGPLFISLYCVSLFAGFAYSVPPIRWKQYPFTNFLITLSSHVGVNFTCYYASRAAFGLPFEMSPPFTFILAFMTVMGMTIAFAKDISDIEGDAKYGVSTVATKLGARNMTFVVSGVLLLTYVSAILAAIIWPQAFKSNVMLLSHAILAFCLIFQTRELALANYASAPSRQFFEFIWKLHYAEYLVYVFI

SEQ ID NO: 1000 - protein, 323 aa, Artificial Sequence
  Synthetic
MSAGSDQIEGSPHHESDNSIATKILNFGHTCWKLQRPYVVKGMISIACGLFGRELFHNTNLLSWSLMLKAFSSLMVILSFNGFAAIMNQIYDVEIDRINKPDLPLVSGEMSIETAWILSIIVALTGLILTIKLNCGPLFISLYCVSLFAGFAYSVPPIRWKQYPFTNFLITISSHVGVNFTCYYASRAAFGLPFEMSPPFTFILAFMTVMGMTIAFAKDISDIEGDAKYGVSTVATKLGARNMTFVVSGILLLNYVSAILAAIIWPQAFKSNVMLLSHAILAFCLIFQTRELALANYASAPSRQFFEFIWKLHYAEYLVYVFI

SEQ ID NO: 1001 - protein, 323 aa, Artificial Sequence
  Synthetic
MSAGSDQIEGSPHHESDNSIATKILNFGHTCWKLQRPYVVKGMISIACGLFGRELFHNTNLLSWSLMLKAFSSLMVILSFNGFAAIMNQIYDVEIDRINKPDLPLVSGEMSIETAWILSIIVALTGLILTIKLNCGPLFISLYCVSLFAGFAYSVPPIRWKQYPFTNFLITISSHVGVNFTCYYASRAAFGLPFEMSPPFTFILAFMTVMGMTIAFAKDISDIEGDAKYGVSTVATKLGAKNMTFVVSGVLLLTYVSAILAAIIWPQAFKSNVMLLSHAILAFCLIFQTRELALANYASAPSRQFFEFIWKLHYAEYLVYVFI

SEQ ID NO: 1002 - protein, 323 aa, Artificial Sequence
  Synthetic
MSAGSDQIEGSPHHESDNSIATKILNFGHTCWKLQRPYVVKGMISIACGLFGRELFHNTNLLSWSLMLKAFSSLMVILSFNGFAAIMNQIYDVEIDRINKPDLPLVSGEMSIETAWILSIIVALTGLILTIKLNCGPLFISLYCVSLFAGFAYSVPPIRWKQYPFTNFLITISSHVGVNFTCYYASRAAFGLPFEMSPPFTFILAFMTVMGMTIAFAKDISDIEGDAKYGVSTVATKLGARNMTFVVSGVLLLTYVSAILAAIIWPQAFKSNVMILSHAILAFCLIFQTRELALANYASAPSRQFFEFIWKLHYAEYLVYVFI

SEQ ID NO: 1003 - protein, 323 aa, Artificial Sequence
  Synthetic
MSAGSDQIEGSPHHESDNSIATKILNFGHTCWKLQRPYVVKGMISIACGLFGRELFHNTNLLSWSLMLKAFSSLMVILSFNGFAAIMNQIYDVEIDRINKPDLPLVSGEMSIETAWILSIIVALTGLILTIKLNCGPLFISLYCVSLFAGFAYSVPPIRWKQYPFTNFLITISSHVGVNFTCYYASRAAFGLPFEMSPPFTFILAFMTVMGMTIAFAKDISDIEGDAKYGVSTVATKLGARNMTFVVSGTLLLNYVSAILAAIIWPQAFKSNVMLLSHAILAFCLIFQTRELALANYASAPSRQFFEFIWKLHYAEYLVYVFI

SEQ ID NO: 1004 - protein, 323 aa, Artificial Sequence
  Synthetic
MSAGSDQIEGSPHHESDNSIATKILNFGHTCWKLQRPYVVKGMISIACGLFGRELFHNTNLLSWSLMLKAFSSLMVILSFNGFAAIMNQIYDVEIDRINKPDLPLVSGEMSIETAWILSIIVALTGLILTIKLNCGPLFISLYCVSLFAGFAYSVPPIRWKQYPFTNFLITISSHVGVNFTCYYASRAAFGLPFEMSPPFTFILAFMTVMGMTIAFAKDISDIEGDAKYGVSTVATKLGARNMTFVVSGVLLLTYVSAIIAAIIWPQAFKSNVMLLSHAILAFCLIFQTRELALANYASAPSRQFFEFIWKLHYAEYLVYVFI

SEQ ID NO: 1005 - protein, 323 aa, Artificial Sequence
  Synthetic
MSAGSDQIEGSPHHESDNSIATKILNFGHTCWKLQRPYVVKGMISIACGLFGRELFHNTNLLSWSLMLKAFSSLMVILSFNGFAAIMNQIYDVEIDRINKPDLPLVSGEMSIETAWILSIIVALTGLILTIKLNCGPLFISLYCVSLFAGFAYSVPPIRWKQYPFTNFLITISSHVGVNFTCYYASRAAFGLPFEMSPAFTFILAFMTVMGMTIAFAKDISDIEGDAKYGVSTVATKLGARNMTFVVSGVLLLTYVSAILAAIIWPQAFKSNVMLLSHAILAFCLIFQTRELALANYASAPSRQFFEFIWKLHYAEYLVYVFI

SEQ ID NO: 1006 - protein, 323 aa, Artificial Sequence
  Synthetic
MSAGSDQIEGSPHHESDNSIATKILNFGHTCWKLQRPYVVKGMISIACGLFGRELFHNTNLLSWSLMLKAFSSLMVILSFNGFAAIMNQIYDVEIDRINKPDLPLVSGEMSIETAWILSIIVALTGLILTIKLNCGPLFISLYCVSLFAGFAYSVPPIRWKQYPFTNFLITISSHVGVNFTCYYASRAAFGLPFELSPPFTFILAFMTVMGMTIAFAKDISDIEGDAKYGVSTVATKLGARNMTFVVSGVLLLTYVSAILAAIIWPQAFKSNVMLLSHAILAFCLIFQTRELALANYASAPSRQFFEFIWKLHYAEYLVYVFI

SEQ ID NO: 1007 - protein, 323 aa, Artificial Sequence
  Synthetic
MSAGSDQIEGSPHHESDNSIATKILNFGHTCWKLQRPYVVKGMISIACGLFGRELFHNTNLLSWSLMLKAFSSLMVILSFNGFAAIMNQIYDVEIDRINKPDLPLVSGEMSIETAWLLSIIVALTGLILTIKLNCGPLFISLYCVSLFAGFAYSVPPIRWKQYPFTNFLITISSHVGVNFTCYYASRAAFGLPFEMSPPFTFILAFMTVMGMTIAFAKDISDIEGDAKYGVSTVATKLGARNMTFVVSGVLLLTYVSAILAAIIWPQAFKSNVMLLSHAILAFCLIFQTRELALANYASAPSRQFFEFIWKLHYAEYLVYVFI

SEQ ID NO: 1008 - protein, 323 aa, Artificial Sequence
  Synthetic
MSAGSDQIEGSPHHESDNSIATKILNFGHTCWKLQRPYVVKGMISIACGLFGRELFHNTNLLSWSLMLKAFSSLMVILSFNGFAAIMNQIYDVEIDRINKPDLPLVSGEMSIETAWILSIIVALTGLILTIKLNCGPLFISLYCVSLFAGFAYSVPPIRWKQYPFTNFLITISSHVGVNFTCYYASRAAFGLPFEMSPPFTFILAFMTVMGMTIAFAKDISDIEGDAKYGVSTVATKLGARNMTFVVSGVLLLTYVSAILAAIIWPQAFKSNVMLLSHAILAFWLIFQTRELALANYASAPSRQFFEFIWKLHYAEYLVYVFI

SEQ ID NO: 1009 - protein, 323 aa, Artificial Sequence
  Synthetic
MSAGSDQIEGSPHHESDNSIATKILNFGHTCWKLQRPYVVKGMISIACGLFGRELFHNTNLLSWSLMLKAFSSLMVILSFNGFAAIMNQIYDVEIDRINKPDLPLVSGEMSIETAWILSIIVALTGLILTIKLNCGPLFISLYCVSLFAGFAYSVPPIRWKQYPFTNFLITISSHVGVNFTCYYASRAAFGLPFEMSPPFTFILAFMTVMGMTIAFAKDISDIEGDAKYGVSTVATKLGARNMTFVVSGILLLTYVSAILAAIIWPQAFKSNVMLLSHAILAFCLIFQTRELALANYASAPSRQFFEFIWKLHYAEYLVYVFI

SEQ ID NO: 1010 - protein, 323 aa, Artificial Sequence
  Synthetic
MSAGSDQIEGSPHHESDNSIATKILNFGHTCWKLQRPYVVKGMISIACGLFGRELFHNTNLLSWSLMLKAFSSLMVILSFNGFAAIMNQIYDVEIDRINKPDLPLVSGEMSIETAWILSIIVALTGLILTIKLNCGPLFISLYCVSLFAGFAYSVPPIRWKQYPFTNFLITISSHVGVNFTCYYASRAAFGLPFEMSPPFTFILAFMTVMGMTIAFAKDISDIEGDKKYGVSTVATKLGARNMTFVVSGVLLLTYVSAILAAIIWPQAFKSNVMLLSHAILAFCLIFQTRELALANYASAPSRQFFEFIWKLHYAEYLVYVFI

SEQ ID NO: 1011 - protein, 323 aa, Artificial Sequence
  Synthetic
MSAGSDQIEGSPHHESDNSIATKILNFGHTCWKLQRPYVVKGMISIACGLFGRELFHNTNLLSWSLMLKAFSSLMVILSFNGFAAIMNQIYDVEIDRINKPDLPLVSGEMSIETAWILSIIVALTGLILTIKLNCGPLFISLYCVSLFAGIAYSVPPIRWKQYPFTNFLITISSHVGVNFTCYYASRAAFGLPFEMSPPFTFILAFMTVMGMTIAFAKDISDIEGDAKYGVSTVATKLGARNMTFVVSGVLLLTYVSAILAAIIWPQAFKSNVMLLSHAILAFCLIFQTRELALANYASAPSRQFFEFIWKLHYAEYLVYVFI

SEQ ID NO: 1012 - protein, 323 aa, Artificial Sequence
  Synthetic
MSAGSDQIEGSPHHESDNSIATKILNFGHTCWKLQRPYVVKGMISIACGLFGRELFHNTNLLSWSLMLKAFSSLMVILSFNGFAAIMNQIYDVEIDRINKPDLPLVSGEMSIETAWILSIIVALTGLILTIKLNCGPLFISLYCVSLFAGFAYSVPPIRWKQYPFTNFLITISSHVGVNFTCYYASRAAFGLPFEMSPPFTFILAFMTLMGMTIAFAKDISDIEGDAKYGVSTVATKLGARNMTFVVSGVLLLTYVSAILAAIIWPQAFKSNVMLLSHAILAFCLIFQTRELALANYASAPSRQFFEFIWKLHYAEYLVYVFI

SEQ ID NO: 1013 - protein, 323 aa, Artificial Sequence
  Synthetic
MSAGSDQIEGSPHHESDNSIATKILNFGHTCWKLQRPYVVKGMISIACGLFGRELFHNTNLLSWSLMLKAFSSLMVILSFNGFAAIMNQIYDVEIDRINKPDLPLVSGEMSIETAWILSIIVALTGLILTIKLNCGPLFISLYCVSLFAGFIYSVPPIRWKQYPFTNFLITISSHVGVNFTCYYASRAAFGLPFEMSPPFTFILAFMTVMGMTIAFAKDISDIEGDAKYGVSTVATKLGARNMTFVVSGVLLLTYVSAILAAIIWPQAFKSNVMLLSHAILAFCLIFQTRELALANYASAPSRQFFEFIWKLHYAEYLVYVFI

SEQ ID NO: 1014 - protein, 323 aa, Artificial Sequence
  Synthetic
MSAGSDQIEGSPHHESDNSIATKILNFGHTCWKLQRPYVVKGMISIACGLFGRELFHNTNLLSWSLMLKAFSSLMVILSFNGFAAIMNQIYDVEIDRINKPDLPLVSGEMSIETAWILSIIVALTGLILTIKLNCGPLFISLYCVSLFAGFAYSVPPIRWKQYPFTNFLITISSHVGVNFTCYYASRAAFGLPFEMSPPFTFILAFMTVMGMTIAFAKDISDIEGDAKYGVSTVATKLGARNMTFVVSGVLLLTYVGAILAAIIWPQAFKSNVMLLSHAILAFCLIFQTRELALANYASAPSRQFFEFIWKLHYAEYLVYVFI

SEQ ID NO: 1015 - protein, 323 aa, Artificial Sequence
  Synthetic
MSAGSDQIEGSPHHESDNSIATKILNFGHTCWKLQRPYVVKGMISIACGLFGRELFHNTNLLSWSLMLKAFSSLMVILSFNGFAAIMNQIYDVEIDRINKPDLPLVSGEMSIETAWILSIIVALTGLILTIKLNCGPLFLSLYCVSLFAGFAYSVPPIRWKQYPFTNFLITISSHVGVNFTCYYASRAAFGLPFEMSPPFTFILAFMTVMGMTIAFAKDISDIEGDAKYGVSTVATKLGARNMTFVVSGVLLLTYVSAILAAIIWPQAFKSNVMLLSHAILAFCLIFQTRELALANYASAPSRQFFEFIWKLHYAEYLVYVFI

SEQ ID NO: 1016 - protein, 323 aa, Artificial Sequence
  Synthetic
MSAGSDQIEGSPHHESDNSIATKILNFGHTCWKLQRPYVVKGMISIACGLFGRELFHNTNLLSWSLMLKAFSSLMVILSFNGFAAIMNQIYDVEIDRINKPDLPLVSGEMSIETAWILSIIVALTGLILTIKLNCGPLFISLYCVSLFAGFAYSVPPIRWKQYPFTNFLITISSHVGVNFTCYYASRAAFGLPFEMSPPFTFILAFMTVMGMTIAFAKDISDIEGDAKYGVSTVATKLGARNMTFVVSGVLLLTYVSAILAAIFWPQAFKSNVMLLSHAILAFCLIFQTRELALANYASAPSRQFFEFIWKLHYAEYLVYVFI

SEQ ID NO: 1017 - protein, 323 aa, Artificial Sequence
  Synthetic
MSAGSDQIEGSPHHESDNSIATKILNFGHTCWKLQRPYVVKGMISIACGLFGRELFHNTNLLSWSLMLKAFSSLMVILSFNGFAAIMNQIYDVEIDRINKPDLPLVSGEMSIETAWILSIIVALTGLILTIKLNCGPLFISLYCVSLFAGFAYSVPPIRWKQYPFTNFLITISSHVGVNFTCYYASRAAFGLPFEMSPPFTFILAFMTVMGMTIAFAKDISDIEGDAKYGVSTVATKLGARNMTFVSSGVLLLTYVSAILAAIIWPQAFKSNVMLLSHAILAFCLIFQTRELALANYASAPSRQFFEFIWKLHYAEYLVYVFI

SEQ ID NO: 1018 - protein, 323 aa, Artificial Sequence
  Synthetic
MSAGSDQIEGSPHHESDNSIATKILNFGHTCWKLQRPYVVKGMISIACGLFGRELFHNTNLLSWSLMLKAFSSLMVILSFNGFAAIMNQIYDVEIDRINKPDLPLVSGEMSIETAWILSIIVALTGLILTIKLNCGPLFISLYCVSLFAGFAYSVPPIRWKQYPFTNFLITISSHVGVNFTCYYASRAAFGLPFEMSPPFTFILAFMTVMGMTIAFAKDISDIEGDAKYGVSTVATKLGARNMTFVVSGALLLNYVSAILAAIIWPQAFKSNVMLLSHAILAFCLIFQTRELALANYASAPSRQFFEFIWKLHYAEYLVYVFI

SEQ ID NO: 1019 - protein, 323 aa, Artificial Sequence
  Synthetic
MSAGSDQIEGSPHHESDNSIATKILNFGHTCWKLQRPYVVKGMISIACGLFGRELFHNTNLLSWSLMLKAFSSLMVILSFNGFAAIMNQIYDVEIDRINKPDLPLVSGEMSIETAWILSIIVALTGLILTIKLNCGPLFISLYCVSLFAGFAYSVPPIRWKQYPFTNFLITISSHVGVNFTCYYASRAAFGLPFEMSPPFTFILAFMTVMGMTIAFAKDISDIEGDAKYGVSTLATKLGARNMTFVVSGVLLLTYVSAILAAIIWPQAFKSNVMLLSHAILAFCLIFQTRELALANYASAPSRQFFEFIWKLHYAEYLVYVFI

SEQ ID NO: 1020 - protein, 323 aa, Artificial Sequence
  Synthetic
MSAGSDQIEGSPHHESDNSIATKILNFGHTCWKLQRPYVVKGMISIACGLFGRELFHNTNLLSWSLMLKAFSSLMVILSFNGFAAIMNQIYDVEIDRINKPDLPLVSGEMSIETAWILSIIVALTGLILTIKLNCGPLFISLYCVSLFAGFAYSVPPIRWKQYPFTNFLITISSHVGVNFTCYYASRAAFGLPFEISPPFTFILAFMTVMGMTIAFAKDISDIEGDAKYGVSTVATKLGARNMTFVVSGVLLLTYVSAILAAIIWPQAFKSNVMLLSHAILAFCLIFQTRELALANYASAPSRQFFEFIWKLHYAEYLVYVFI

SEQ ID NO: 1021 - protein, 323 aa, Artificial Sequence
  Synthetic
MSAGSDQIEGSPHHESDNSIATKILNFGHTCWKLQRPYVVKGMISIACGLFGRELFHNTNLLSWSLMLKAFSSLMVILSFNGFAAIMNQIYDVEIDRINKPDLPLVSGEMSIETAWILSIIVALTGLILTIKLNCGPLFISLYCVSLFAGFAYSVPPIRWKQYPFTNFLITISSHVGVNFTCYYASRAAFGLPFEMSPPFTFILAFMTVMGMTIAFAKDISDIEGDAKYGISTVATKLGARNMTFVVSGVLLLTYVSAILAAIIWPQAFKSNVMLLSHAILAFCLIFQTRELALANYASAPSRQFFEFIWKLHYAEYLVYVFI

SEQ ID NO: 1022 - protein, 323 aa, Artificial Sequence
  Synthetic
MSAGSDQIEGSPHHESDNSIATKILNFGHTCWKLQRPYVVKGMISIACGLFGRELFHNTNLLSWSLMLKAFSSLMVILSFNGFAAIMNQIYDVEIDRINKPDLPLVSGEMSIETAWILSIIVALTGLILTIKLNCGPLFISLYCVSLFAGFAYSVPPIRWKQYPFTNFLITISSHVGVNFTCYYASRAAFGLPFEMSPPFTFILAFMTVMGMTIAFAKDISDIEGDAKYGVSTFATKLGARNMTFVVSGVLLLTYVSAILAAIIWPQAFKSNVMLLSHAILAFCLIFQTRELALANYASAPSRQFFEFIWKLHYAEYLVYVFI

SEQ ID NO: 1023 - protein, 323 aa, Artificial Sequence
  Synthetic
MSAGSDQIEGSPHHESDNSIATKILNFGHTCWKLQRPYVVKGMISIACGLFGRELFHNTNLLSWSLMLKAFSSLMVILSFNGFAAGMNQIYDVEIDRINKPDLPLVSGEMSIETAWILSIIVALTGLILTIKLNCGPLFISLYCVSLFAGFAYSVPPIRWKQYPFTNFLITISSHVGVNFTCYYASRAAFGLPFEMSPPFTFILAFMTVMGMTIAFAKDISDIEGDAKYGVSTVATKLGARNMTFVVSGVLLLTYVSAILAAIIWPQAFKSNVMLLSHAILAFCLIFQTRELALANYASAPSRQFFEFIWKLHYAEYLVYVFI

SEQ ID NO: 1024 - protein, 323 aa, Artificial Sequence
  Synthetic
MSAGSDQIEGSPHHESDNSIATKILNFGHTCWKLQRPYVVKGMISIACGLFGRELFHNTNLLSWSLMLKAFSSLMVILSFNGFAAIMNQIYDVEIDRINKPDLPLVSGEMSIETAWILSIIVALTGLILTIKLNCGPLFISLYCVSLFAGFAYSVPPIRWKQYPFTNFLITISSHVGVNFTCYYASRAAFGLPFEMSPPFTFILAFMTVMGMTIAFAKDISDIEGDAKYGVSTVATKLGARNMTFIVSGVLLLTYVSAILAAIIWPQAFKSNVMLLSHAILAFCLIFQTRELALANYASAPSRQFFEFIWKLHYAEYLVYVFI

SEQ ID NO: 1025 - protein, 323 aa, Artificial Sequence
  Synthetic
MSAGSDQIEGSPHHESDNSIATKILNFGHTCWKLQRPYVVKGMISIACGLFGRELFHNTNLLSWSLMLKAFSSLMVILSFNGFAAIMNQIYDVEIDRINKPDLPLVSGEMSIETAWILSIIVALTGLILTIKLNCGPLFISLYCVSLFAGFAYSVPPIRWKQYPFTNFLITISSHVGVNFTCYYASRAAFGLPFEMSPPFTFILAFMTVMGMTIAFAKDISDIEGDAKYGVSTVATKLGARNMTFVVSGVLLLAYVSAILAAIIWPQAFKSNVMLLSHAILAFCLIFQTRELALANYASAPSRQFFEFIWKLHYAEYLVYVFI

SEQ ID NO: 1026 - protein, 323 aa, Artificial Sequence
  Synthetic
MSAGSDQIEGSPHHESDNSIATKILNFGHTCWKLQRPYVVKGMISIACGLFGRELFHNTNLLSWSLMLKAFSSLVVILSFNGFAAIMNQIYDVEIDRINKPDLPLVSGEMSIETAWILSIIVALTGLILTIKLNCGPLFISLYCVSLFAGFAYSVPPIRWKQYPFTNFLITISSHVGVNFTCYYASRAAFGLPFEMSPPFTFILAFMTVMGMTIAFAKDISDIEGDAKYGVSTVATKLGARNMTFVVSGVLLLTYVSAILAAIIWPQAFKSNVMLLSHAILAFCLIFQTRELALANYASAPSRQFFEFIWKLHYAEYLVYVFI

SEQ ID NO: 1027 - protein, 323 aa, Artificial Sequence
  Synthetic
MSAGSDQIEGSPHHESDNSIATKILNFGHTCWKLQRPYVVKGMISIACGLFGRELFHNTNLLSWSLMLKAFSSLMVILSFNGFAAIMNQIYDVEIDRINKPDLPLVSGEMSIETAWILSIIVALTGLILTIKLNCGPLFISLYCVSLFAGFAYSVPPIRWKQYPFTNFLITISSHVGVNFTCYYASRAAFGLPFEMSPPFTFILAFMTVMGMVIAFAKDISDIEGDAKYGVSTVATKLGARNMTFVVSGVLLLTYVSAILAAIIWPQAFKSNVMLLSHAILAFCLIFQTRELALANYASAPSRQFFEFIWKLHYAEYLVYVFI

SEQ ID NO: 1028 - protein, 323 aa, Artificial Sequence
  Synthetic
MSAGSDQIEGSPHHESDNSIATKILNFGHTCWKFQRPYVVKGLISAACSLFGKELLHNTNLISWSLMFKAFFALVPILSFNFFAAAINQIYDVEIDRINKPDLPLVSGELSIRTAWILSIIVALTGLIVTIKMKGGPLFISIYIFGLFLGFAYSVPPIRWKQYPFTNFLITFSSHVTLPFTSYYASRAALGLPFELRPSFSFIIAFMTVMGMTIAFAKDISDIEGDKKYGVSTLATKLGARNMTRVVSGVLLLNYVVAILAGIIWPFAFNSNVMIFSHAILAFCLIFRTRELALANYASAPSRQFFEFIWNLYYAEYLVYVFI

SEQ ID NO: 1029 - protein, 323 aa, Artificial Sequence
  Synthetic
MSAGSDQIEGSPHHESDNSIATKILNFGHTCWKLQRPYVVKGLISIACGLFGKELLHNTNLISWSLMFKAFFALVPILSFNGFANGINQIYDVEIDRINKPDLPLASGEMSIRTAWILSIIVALTGLIVTIKMKGGPLFVSLYIFGLFLGFAYSVPPIRWKQYPFTNFLIIISSHVGLNFTSYYASRAALGLPFELRPSFSFIIAFMTVMGMTIAFAKDISDIEGDKKHGVSTLATKLGAKNMTRVVSGFLLLNYLLAILAGIIWPFAFNSNVMILSHAILAFCLIFRTRELALANYASAPSRQFFEFIWKLYYAEYLVYVFI

SEQ ID NO: 1030 - protein, 323 aa, Artificial Sequence
  Synthetic
MSAGSDQIEGSPHHESDNSIATKILNFGHTCWKLQRPYVVKGMISIACGLFGRELFHNTNLLSWSLMLKAFSSLIVILSFNGFAAIMNQIYDVEIDRINKPDLPLVSGEMSIETAWILSIIVALTGLILTIKLNCGPLFISLYCVSLFAGFAYSVPPIRWKQYPFTNFLITISSHVGVNFTCYYASRAAFGLPFEMSPPFTFILAFMTVMGMTIAFAKDISDIEGDAKYGVSTVATKLGARNMTFVVSGVLLLTYVSAILAAIIWPQAFKSNVMLLSHAILAFCLIFQTRELALANYASAPSRQFFEFIWKLHYAEYLVYVFI

SEQ ID NO: 1031 - protein, 323 aa, Artificial Sequence
  Synthetic
MSAGSDQIEGSPHHESDNSIATKILNFGHTCWKLQRPYVVKGMISIACGLFGRELFHNTNLLSWSLMLKAFSSLMVILSFNGFAAIMNQIYDVEIDRINKPDLPLVSGEMSIETAWILSIIVALTGLILTIKLNCGPLFISLYCVSLFAGFAYSVPPIRWKQYPFTNFLITISSHVGVNFTCYYASRAAFGLPFEMSPPFTFILAFMTVMGMTIAFAKDISDIEGDAKYGVSTLATKLGARNMTFVVSGVLLLNYVSAILAAIIWPQAFKSNVMLLSHAILAFCLIFQTRELALANYASAPSRQFFEFIWKLHYAEYLVYVFI

SEQ ID NO: 1032 - protein, 323 aa, Artificial Sequence
  Synthetic
MSAGSDQIEGSPHHESDNSIATKILNFGHTCWKLQRPYVVKGMISIACGLFGRELFHNTNLLSWSLMLKAFSSLMVILSFNGFAAIMNQIYDVEIDRINKPDLPLVSGEMSIETAWILSIIVALTGLILTIKLNCGPLFISLYCVSLFAGFAYSVPPIRWKQYPFTNFLITISSHVGVNFTCYYASRAAFGLPFEMSPPFTFILAFMTVMGMTIAFAKDISDIEGDAKYGVSTVATKLGARNMTFVVSGVLLLCYVSAILAAIIWPQAFKSNVMLLSHAILAFCLIFQTRELALANYASAPSRQFFEFIWKLHYAEYLVYVFI

SEQ ID NO: 1033 - protein, 323 aa, Artificial Sequence
  Synthetic
MSAGSDQIEGSPHHESDNSIATKILNFGHTCWKLQRPYVVKGMISIACGLFGRELFHNTNLLSWSLMLKAFSSLMVILSFNGFAAIMNQIYDVEIDRINKPDLPLVSGEMSIETAWILSIIVALTGLILTIKLNCGPLFISLYCVSLFAGFAYSVPPIRWKQYPFTNFLITISSHVGVNFTCYYASRAAVGLPFEMSPPFTFILAFMTVMGMTIAFAKDISDIEGDAKYGVSTVATKLGARNMTFVVSGVLLLTYVSAILAAIIWPQAFKSNVMLLSHAILAFCLIFQTRELALANYASAPSRQFFEFIWKLHYAEYLVYVFI

SEQ ID NO: 1034 - protein, 323 aa, Artificial Sequence
  Synthetic
MSAGSDQIEGSPHHESDNSIATKILNFGHTCWKLQRPYVVKGMISIACGLFGRELFHNTNLLSWSLMLKAFSSLMVILSFNGFAAIMNQIYDVEIDRINKPDLPLVSGEMSIETAWILSIIVALTGLILTIKLNCGPLFISLYCVSLFAGFAYSVPPIRWKQYPFTNFLITISSHVLVNFTCYYASRAAFGLPFEMSPPFTFILAFMTVMGMTIAFAKDISDIEGDAKYGVSTVATKLGARNMTFVVSGVLLLNYVSAILAAIIWPQAFKSNVMLLSHAILAFCLIFQTRELALANYASAPSRQFFEFIWKLHYAEYLVYVFI

SEQ ID NO: 1035 - protein, 323 aa, Artificial Sequence
  Synthetic
MSAGSDQIEGSPHHESDNSIATKILNFGHTCWKLQRPYVVKGMISIACGLFGRELFHNTNLLSWSLMLKAFSSLMVILSFNGFAAIMNQIYDVEIDRINKPDLPLVSGEMSIETAWILSIIVALTGLILTIKLNCGPLFISLYCVSLFAGFAYSVPPIRWKQYPFTNFLITISSHVGVNFTCYYASRAAFGLPFEMSPPFTFILAFMTVMGITIAFAKDISDIEGDAKYGVSTVATKLGARNMTFVVSGVLLLTYVSAILAAIIWPQAFKSNVMLLSHAILAFCLIFQTRELALANYASAPSRQFFEFIWKLHYAEYLVYVFI

SEQ ID NO: 1036 - protein, 323 aa, Artificial Sequence
  Synthetic
MSAGSDQIEGSPHHESDNSIATKILNFGHACWKLQRPYTVKGLISIACGLFGKELLHNTNLISWSLMFKAFFALVPILSFNGFANIINQIYDVEIDRINKPDLPLVSGEMSIRTAWILSIIVALTGLIITIKMKGGPLFFFLYIFGLFLGFAYSVPPIRWKQYPFTNFLIIISSHVGLAFTSYYASRAALGLPFELRPSFSFIIAFMTVMTMTIAFAKDISDIEGDKKYGVSTLATKLGARNTTRICSGLLLLNYLVSILAGIIWPFAFNSNVMILSHAILAFCLIFRTRELALANYASAPSRQFFEFIWKLYYAEYLVYVFI

SEQ ID NO: 1037 - protein, 323 aa, Artificial Sequence
  Synthetic
MSAGSDQIEGSPHHESDNSIATKILNFGHTCWKFTRPYVVKGLISIACSLFGKELLHNTNLISWSLMFKAFFALVPILSFNFFAAAMNQIYDVEIDRINKPYLPLVSGEMSIRTAWILSIIVALTGLIVTIKMKGGPLLVFIYIFGLFLGFAYSVPPIRWKQYPFTNFLITISSHVGLAFTVYYASRAALGLPFELRPSFSFIIAFMTVMGMVIAFAKDISDIEGDRKYGVSTLAVKLGARNMTRVGSGLLLLNYVGSILAGIIWPFAFNSNVMILSHAILASCLIFRTRELALANYASAPSRQFFEFIWNLYYAEYLVYVFI

SEQ ID NO: 1038 - protein, 323 aa, Artificial Sequence
  Synthetic
MSAGSDQIEGSPHHESDNSIATKILNFGHAFWKLQRPYVVKGVISGACALFGKELLHNTNLISWSLMFKAFFALVPILSFNFFAAGVNQIYDVEIDRINKPDLPIVSGEMSIRTAWILSIIVALTGLIVTIKMKGGPLLVIIYILGIFAGFAYSVPPIRWKQYPFTNFAIIILSHVGLAFTVYYASRAALGLPFELRPSFSFIIAFMTVFGMAIAFAKDISDIEGDAKYGVSTLATKLGARNMTWVVSGLLLLNYLVAILAGIIWPFAFNSNVMILSHAILAFCLIFRTRELALANYASAPSRQFFEFIWLLYYAEYLVYVFI

SEQ ID NO: 1039 - protein, 323 aa, Artificial Sequence
  Synthetic
MSAGSDQIEGSPHHESDNSIATKILNFGHAFWKLQRPYVVKGLIIIACGLFGKELLHNTNLISWSLMFKAFFGLIPILSFNFFAAALNQIYDVEIDRINKPDLPLVSGELSIRTAWILSIIVALTGLIVTIKMKGGPLFVFLYIFGLFAGFAYSVPPIRWKQYPFTNFLITISSHVVLAFTSYYASRAALGLPFELRPSFSFIIAFMTVMGLTIAFAKDISDIEGDAAYGVSTLATKLGARTMTRVCSGLLLLNYLLAILAGIIWPFAFNSNVMILSHAILAFCLIFRTRELALANYASAPSRQFFEFIWLLYYAEYLVYVFI

SEQ ID NO: 1040 - protein, 323 aa, Artificial Sequence
  Synthetic
MSAGSDQIEGSPHHESDNSIATKILNFGHACWKLQRPYVVKGLISIACGLFAKELLHNTNLISWSLMFKAFFALVPILSFNFFAAAMNQIYDVEIDRINKPDLPLVSGEMSIRTAWILSISVALTGLILTIKMKGGPLFVSIYIFGLFAGFAYSVPPIRWKQYPFTNFLIIISSHVGLAFTVYYASRAALGLPFELRPSFSFIIAFMTVMAMTIAFAKDISDIEGDRKYGVSTFATKLGARNMTRVCSGLLLLNYLGAILAGIIWPFAFNKNVMILSHAILAFWLIFRTRELALANYASAPSRQFFEFIWNLYYAEYLVYVFI

SEQ ID NO: 1041 - protein, 323 aa, Artificial Sequence
  Synthetic
MSAGSDQIEGSPHHESDNSIATKILNFGHTCWKLQRPYVVKGLISIACGLFGKELLHNTNLISWSLMFKAFFALVPILSFNGFANGINQIYDVEIDRINKPDLPLVSGEMSIRTAWILSIIVALTGLIVTIKMKGGPLFVIIYIFGLFAGFAYSVPPIRWKQYPFTNFLIIISSHVTLAFTVYYASRAALGLPFELSPSFSFIIAFMTVMGLAIAFAKDISDIEGDKKYGVSTLATKLGARNSTRVVSGLLLLNYLVSILAGIIWPFAFNSNVMIPSHAILASCLIFRTRELALANYASAPSRQFFEFIWKLYYAEYLVYVFI

SEQ ID NO: 1042 - protein, 323 aa, Artificial Sequence
  Synthetic
MSAGSDQIEGSPHHESDNSIATKILNFGHTCWKLQRPYVVKGLISGACGLFGKELLHNTNLISWSLMFKAFFALVPILSFNGFAAIINQIYDVEIDRINKPDLPLASGELSIRTAWILSIIVALTGLILTIKMKGGPLFVFIYIFGLFIGFAYSVPPIRWKQYPFTNFLIIISSHVGLNFTSYYASRAALGLPFELRPSFSFIIAFMTVMGLTIAFAKDISDIEGDAKFGVSTLATKLGAKNMTRICSGLLLLNYLVAILAGIIWPFAFNSNVMILSHAILAFCLIFRTRELALANYASAPSRQFFEFIWKLYYAEYLVYVFI

SEQ ID NO: 1043 - protein, 323 aa, Artificial Sequence
  Synthetic
MSAGSDQIEGSPHHESDNSIATKILNFGHACWKLQRPYVVKGLISIACSLFGKELLHNTNLISWSLMFKAFFALVPILSFNFFAAAINQIYDVEIDRINKPYLPLASGEMSIRTAWILSISVALTGLILTIKMKGGPLFLFIYIFGLFAGFAYSVPPIRWKQYPFTNFLITISSHVGLNFTSYYASRAALGLPFELSPSFSFIIAFMTVMGMVIAFAKDISDIEGDKKYGVSTVATKLGARNTTRLCSGLLLLNYLVSILAGIIWPFAFNSNVMILSHAILAFCLIFRTRELALANYASAPSRQFFEFIWNLYYAEYLVYVFI

SEQ ID NO: 1044 - protein, 323 aa, Artificial Sequence
  Synthetic
MSAGSDQIEGSPHHESDNSIATKILNFGHTFWKLQRPYVVKGLISIACGLFGKELLHNTNLISWSLMFKAFFALVPILSFNFFAAAINQIYDVEIDRINKPDLPLASGEMSIRTAWILSISVALTGLIITIKMKGGPLLVCIYIFGLFAGFAYSVPPIRWKQYPFTNFLIIIISHVGLPFTSYYASRAALGLPFELRPSFSFIIAFMTVMGITIAFAKDISDIEGDKKYGVSTLATKLGAKNMTRICSGVLLLNYLVSILAGIIWPFAFNSNVMILSHAILAFFLIFRTRELALANYASAPSRQFFEFIWLLYYAEYLVYVFI

SEQ ID NO: 1045 - protein, 323 aa, Artificial Sequence
  Synthetic
MSAGSDQIEGSPHHESDNSIATKILNFGHTCWKLQRPYVVKGLILIACGLFGKELLHNTNLISWSLMFKAFFALVPILSFNFFAAAMNQIYDVEIDRINKPDLPLASGEMSIRTAWILSIIVALTGLIVTIKMKGGPLAVFIYIFGLLLGFAYSVPPIRWKQYPFTNFLIIISSHVGLAFTSYYASRAALGLPFELRPSFSFIIAFMTVMGMVIAFAKDISDVEGDAKYGVSTLAVKLGVKNTTRLCSGVLLLNYLGSILAGIIWPFAFNSNVMILSHAILAFCLIFRTRELALANYASAPSRQFFEFIWNLYYAEYLVYVFI

SEQ ID NO: 1046 - protein, 323 aa, Artificial Sequence
  Synthetic
MSAGSDQIEGSPHHESDNSIATKILNFGHAFWKLQRPYVVKGLISIACGLFGKELLHNTNLISWSLMFKAFFALVPILSFNFFAAVVNQIYDVEIDRINKPDLPLVSGEMSIETAWILSIIVALTGLIVTIKMKGGPLLVSIYILGLLAGFAYSVPPIRWKQYPFTNFLIIISSHVILAFVSYYASRAALGLPFELSPSFSFIIAFVTVMSMTIAFAKDISDIEGDAKYGVSTLATKLGARNMTRLCSGLLLLNYLVSILAGIIWPQAFNSNVMIGSHAILAFSLIFQTRELALANYASAPSRQFFEFIWNLYYAEYLVYVFI

SEQ ID NO: 1047 - protein, 323 aa, Artificial Sequence
  Synthetic
MSAGSDQIEGSPHHESDNSIATKILNFGHAFWKLTRPYVVKGLILCACGLFGKELLHNTNLISWSLMFKAFFALIPILSFNFFAAAMNQIYDVEIDRINKPDLPLASGEMSIRTAWILSIIVALTGLIITIKMKGGPLIVFIYIFGLFLGAAYSVPPIRWKQYPFTNFLITFSSHVGLAFTSYYASRAALGLPFELRPSFSFIIAFMTVMGMAIAFAKDISDIEGDAKYGVSTLATKLGARNMTRIVSGLLLLNYLVAILAGIIWPFAFNSNVMILSHAILAFCLIFRTRELALANYASAPSRQFFEFIWLLYYAEYLVYVFI

SEQ ID NO: 1048 - protein, 323 aa, Artificial Sequence
  Synthetic
MSAGSDQIEGSPHHESDNSIATKILNFGHTCWKFQRPYVVKGLILIACGLFGKELLHNTNLISWSLMFKAFFALVPILSFNGFAAGMNQIYDVEIDRINKPDLPLVSGEMSIRTAWILSIIVALTGLIVTIKMKGGPLLTFIYIFGLFAGFAYSVPPIRWKQYPFTNFLITISSHVTLNFTFYYASRAALGLPFELRPSFSFIIAFMTVMGITIAFAKDISDIEGDKKYGVSTVATKLGARNTTRLCSGLLLLNYLVAILAGIIWPFAFNSNVMIFSHAILAFCLIFRTRELALANYASAPSRQFFEFIWKLYYAEYLVYVFI

SEQ ID NO: 1049 - protein, 323 aa, Artificial Sequence
  Synthetic
MSAGSDQIEGSPHHESDNSIATKILNFGHTFWKLQRPYTVKGVISGACGLFGKELLHNTNLISWSLMFKAFFALVPILSFNAFANIVNQIYDVEIDRINKPDLPLVSGEMSIRTAWILSIIVALTGLILTIKMKGGPLLVFIYILGIFLGFAYSVPPIRWKQYPFTNFLITLSSHVILAFTSYYASRAALGLPFELRPSFSFIIAFMTVFGMTIAFAKDISDIEGDKKYGVSTVATKLGARNMTWLCSGVLLLNYLGAILAGIIWPFAFNSNVMILSHAILAFWLIFRTRELALANYASAPSRQFFEFIWLLYYAEYLVYVFI

SEQ ID NO: 1050 - protein, 323 aa, Artificial Sequence
  Synthetic
MSAGSDQIEGSPHHESDNSIATKILNFGHAFWKLQRPYTVKGVILGACCLFGKELLHNTNLISWSLMFKAFAALVPILLFNFFAAIVNQIYDVEIDRINKPDLPLVSGEMSIRTAWILSISVALTGLLVTIKMKGGPLFVFIYILGIFAGFAYSVPPIRWKQYPFTNFLITISSHVGLAFTVYYASRAALGLPFELRPSFSFIIAFMTVMGMTIAFAKDISDIEGDKKFGVSTLATKLGARNMTWVCSGLLLLNYLVSILAGIIWPFAFNSNVMILSHAILASCLIFRTRELALANYASAPSRQFFEFIWLLYYAEYLVYVFI

SEQ ID NO: 1051 - protein, 323 aa, Artificial Sequence
  Synthetic
MSAGSDQIEGSPHHESDNSIATKILNFGHTCWKLARPYVVKGLISIACGLFGKELLHNTNLISWSLMFKAFFALIPILSFNFFAAAINQIYDVEIDRINKPDLPIVSGEMSIRTAWIISIIVALTGLIVTIKMKGGPLLLFLYIFGLFAGAAYSVPPIRWKQYPFTNFLITISSHVGLAFTSYYASRAALGLPFELRPSFSFIIAFMTVMGMVIAFAKDISDIEGDAKYGVSTMATKLGARNITRVVSGVLLLNYVGAILAGIFWPFAFNSNVMILSHAILAFCLIFRTRELALANYASAPSRQFFEFIWNLYYAEYLVYVFI

SEQ ID NO: 1052 - protein, 323 aa, Artificial Sequence
  Synthetic
MSAGSDQIEGSPHHESDNSIATKILNFGHTFWKFSRPYTVKGLISISCGLFGKELLHNTNLISWSLMFKAFVALVPILSFNFFANVVNQIYDVEIDRINKPDLPLVSGEMSIETAWILSIIVALTGLILTIKMKGGPLFVSIYILGLFAGFVYSVPPIRWKQYPFTNFLIIISSHVGLAFTVYYASRAALGLPFELRPSFSFIIAFVTVMSMVIAFAKDISDIEGDKKYGVSTVATKLGARNMTRVVSGLLLLNYLVSILAGIIWPQAFNSNVMILSHAILAFCLIFQTRELALANYASAPSRQFFEFIWNLYYAEYLVYVFI

SEQ ID NO: 1053 - protein, 323 aa, Artificial Sequence
  Synthetic
MSAGSDQIEGSPHHESDNSIATKILNFGHAFWKLQRPYVVKGLISIACGLFGKELLHNTNLISWSLMFKAFFALVPILSFNFFAAAMNQIYDVEIDRINKPDLPLVSGEISIRTAWIISISVALTGLIITIKMKGGPLFVFIYIFGLFAGAAYSVPPIRWKQYPFTNFLITISSHVGLAFTSYYASRAALGLPFELRPSFSFIIAFMTVMGIGIAFAKDISDVEGDAKYGVSTLATKLGVKTMTRLVSGVLLLNYLVAILAGIIWPFAFNSNVMILSHAIAAFCLIFRTRELALANYASAPSRQFFEFIWLLYYAEYLVYVFI

SEQ ID NO: 1054 - protein, 323 aa, Artificial Sequence
  Synthetic
MSAGSDQIEGSPHHESDNSIATKILNFGHAFWKLQRPYTVKGLISIACGLFGKELLHNTNLISWSLMFKAFFALVPILCFNFFAAVVNQIYDVEIDRINKPDLPLASGEMSIETAWILSIIVALTGLIVTIKMKGGPLFVSIYILGLFLGFAYSVPPIRWKQYPFTNFLIIISVHVGLAFTSYYASRAALGLPFELRPSFSFIIAFMTVFGLVIAFAKDISDIEGDAKYGVSTVATKLGARNMTRLCSGLLLLNYLGAILAGIIWPQAFNSNVMILSHAILAFCLIFQTRELALANYASAPSRQFFEFIWNLYYAEYLVYVFI

SEQ ID NO: 1055 - protein, 323 aa, Artificial Sequence
  Synthetic
MSAGSDQIEGSPHHESDNSIATKILNFGHTFWKLQRPYVVKGVILIACILFGKELLHNTNLISWSLMFKAFVALVPILSFNAFAAIVNQIYDVEIDRINKPDLPLASGEMSIRTAWILSIIVALTGLILTIKMKGGPLFVVLYILGIFAGFAYSVPPIRWKQYPFTNFLITISSHVGLAFTSYYASRAALGLPFELRPSFSFIIAFMTVMSMTIAFAKDISDIEGDKKYGVSTLATKLGAKNMTWVVSGVLLLNYVVAILAGIIWPFAFNSNVMILSHIILAFWLIFRTRELALANYASAPSRQFFEFIWLLYYAEYLVYVFI

SEQ ID NO: 1056 - protein, 323 aa, Artificial Sequence
  Synthetic
MSAGSDQIEGSPHHESDNSIATKILNFGHTFWKLQRPYVVKGLIFIACGLFGKELLHNTNLISWSLMFKAFFALIPILSFNFFAAVVNQIYDVEIDRINKPDLPIASGEMSIETAWILSIIVALTGLIVTIKMKGGPLLTVIYILGLFAGFIYSVPPIRWKQYPFTNFLIIISSHVLLPFTSYYASRAALGLPFELRPSFSFIIAFVTVMGMTIAFAKDISDIEGDRKYGVSTLATKLGARNMTRVGSGVLLLNYLVAILAGIIWPQAFNSNVMILSHAILAFCLIFQTRELALANYASAPSRQFFEFIWNLYYAEYLVYVFI

SEQ ID NO: 1057 - protein, 323 aa, Artificial Sequence
  Synthetic
MSAGSDQIEGSPHHESDNSIATKILNFGHTFWKLQRPYVVKGVISIACGLFGKELLHNTNLISWSLMFKAFFALVPILSFNFFAAIVNQIYDVEIDRINKPDLPLVSGELSIRTAWILSIIVALTGLIVTIKMKGGPLLTSIYILGIFAGFAYSVPPIRWKQYPFTNFIITLSSHVLLAFTSYYASRAALGLPFELRPSFSFIIAFMTVMGMTIAFAKDISDIEGDKKYGVSTFATKLGARNMTWICSGLLILNYVGAILAGIIWPFAFNSNVMILSHAILAFCLIFRTRELALANYASAPSRQFFEFIWLLYYAEYLVYVFI

SEQ ID NO: 1058 - protein, 323 aa, Artificial Sequence
  Synthetic
MSAGSDQIEGSPHHESDNSIATKILNFGHAFWKLQRPYVVKGLISIACGLFGKELLHNTNLISWSLMFKAFFALVPILSFNFFAAAINQIYDVEIDRINKPDLPLVSGEMSIRTAWILSIIVALTGLILTIKMKGGPLFVFLYIFGLFAGFFYSVPPIRWKQYPFTNFLIIISSHVLLAFTSYYASRAALGLPFELRPSFSFIIAFMTVFSMVIAFAKDISDIEGDKKYGVSTLATKLGAKNMTRIVSGVLLLNYLVAILAGIIWPFAFNSNVMILSHAILAFWLIFRTRELALANYASAPSRQFFEFIWLLYYAEYLVYVFI

SEQ ID NO: 1059 - protein, 323 aa, Artificial Sequence
  Synthetic
MSAGSDQIEGSPHHESDNSIATKILNFGHAFWKLQRPYVIKGLILGACSLFGKELLHNTNLISWSLMFKAFFALVPILSFNFFAAAMNQIYDVEIDRINKPDLPLASGELSIRTAWILSIIVALTGLIITIKMKGGPLFVFIYIFGLFLGFAYSVPPIRWKQYPFTNFLIIISSHVGLAFTSYYASRAALGLPFELRPSFSFIIAFMTVMSLVIAFAKDISDIEGDRKYGVSTLATKLGARNMTRVVSGLLLLNYLVSILAGIIWPFAFNSNVMILSHAILAFCLIFRTRELALANYASAPSRQFFEFIWLLYYAEYLVYVFI

SEQ ID NO: 1060 - protein, 323 aa, Artificial Sequence
  Synthetic
MSAGSDQIEGSPHHESDNSIATKILNFGHACWKLQRPYVVKGLISIACGLFGKELLHNTNLISWSLMFKAFFALVPILLFNFFANAMNQIYDVEIDRINKPDLPLVSGEMSIRTAWILSIIVALTGLIITIKMKGGPLLVFIYIFGLFLGFAYSVPPIRWKQYPFTNFLIIISSHVGLAFTVYYASRAALGLPFELRPSFSFIIAFMTVMSMTIAFAKDISDIEGDAKFGVSTVATKLGVKNTTRVCSGLLLLNYLVSILAGIIWPFAFNSNVMILSHAILAFILIFRTRELALANYASAPSRQFFEFIWNLYYAEYLVYVFI

SEQ ID NO: 1061 - protein, 323 aa, Artificial Sequence
  Synthetic
MSAGSDQIEGSPHHESDNSIATKILNFGHTFWKFQRPYVVKGLISIACGLFGKELLHNTNLISWSLMFKAFFALVPILSFNFFAAAMNQIYDVEIDRINKPDLPLASGEMSIRTAWIISIIVALTGLIVTIKMKGGPLFVCIYIFGLFLGAAYSVPPIRWKQYPFTNFLITISVHVGLAFTVYYASRAALGLPFELRPSFSFIIAFVTVMSMTIAFAKDISDIEGDKKYGVSTVATKLGAKNMTRAVSGVLLLNYVVAILAGIIWPFAFNSNVMILSHAILAFVLIFRTRELALANYASAPSRQFFEFIWLLYYAEYLVYVFI

SEQ ID NO: 1062 - protein, 323 aa, Artificial Sequence
  Synthetic
MSAGSDQIEGSPHHESDNSIATKILNFGHTCWKLQRPYVIKGLILIACGLFGKELLHNTNLISWSLMFKAFFALVPILSFNFFAAAINQIYDVEIDRINKPDLPLASGEMSIRTAWILSIIVALTGLIVTIKMKGGPLFVFIYIFGLFLGTAYSVPPIRWKQYPFTAFLIIITSHVGLAFTSYYASRAALGLPFELRPSFSFIIAFMTVMGMVIAFAKDISDIEGDKKYGVSTVATKLGAKNTTRLCSGVLLLNYVVSILAGIIWPFAFNSNVMILSHAILAFCLIFRTRELALANYASAPSRQFFEFIWNLYYAEYLVYVFI

SEQ ID NO: 1063 - protein, 323 aa, Artificial Sequence
  Synthetic
MSAGSDQIEGSPHHESDNSIATKILNFGHTCWKLQRPYVVKGLISIACGLFGKELLHNTNLISWSLMFKAFFALVPILSFNGFAAIMNQIYDVEIDRINKPDLPLVSGEMSIRTAWILSIIVALTGLIVTIKMKGGPLIVSLYIFGLFLGFAYSVPPIRWKQYPFTNFLITISSHVGLNFTVYYASRAALGLPFELRPSFSFIIAFMTVMGITIAFAKDISDVEGDAKYGISTLATKLGVKNMTRVCSGVLLLNYLVAILAGIIWPFAFNGNVMILSHAILASCLIFRTRELALANYASAPSRQFFEFIWKLYYAEYLVYVFI

SEQ ID NO: 1064 - protein, 323 aa, Artificial Sequence
  Synthetic
MSAGSDQIEGSPHHESDNSIATKILNFGHTFWKLQRPYTVKGVIIIACGLFGKELLHNTNLINWSLMFKAFFALVPILSFNFFAAIVNQIYDVEIDRINKPDLPLVSGEMSIRTAWILSIIVALTGLIVTIKMKGGPLLTVIYILGIFAGFIYSVPPIRWKQYPFTNFLITISSHVGLAFTVYYASRAALGLPFELSPSFSFITAFMTVMGMTIAFAKDISDIEGDKKYGVSTVATKLGAKNMTWAVSGVLLLNYVGAILAGIIWPFAFNSNVMILSHAILAFCLIFRTRELALANYASAPSRQFFEFIWLLYYAEYLVYVFI

SEQ ID NO: 1065 - protein, 323 aa, Artificial Sequence
  Synthetic
MSAGSDQIEGSPHHESDNSIATKILNFGHTCWKLQRPYVVKGLILIACGLFGKELLHNTNLISWSLMFKAFFALVPILSFNFFAAAINQIYDVEIDRINKPDLPLVSGEMSIRTAWILSIIVALTGLILTIKMKGGPLFVFLYIFGLFLGFAYSVPPIRWKQYPFTNFLIIVSSHVILNFTVYYASRAALGLPFELRPSFSFITAFMTVFGMVIAFAKDISDIEGDAKYGVSTLATKLGAKNMTRVVSGLLLLNYLVSILAGIIWPFAFNSNVMILSHAILAFCLIFRTRELALANYASAPSRQFFEFIWNLYYAEYLVYVFI

SEQ ID NO: 1066 - protein, 323 aa, Artificial Sequence
  Synthetic
MSAGSDQIEGSPHHESDNSIATKILNFGHAFWKLQRPYVVKGLISGACGLFGKELLHNTNLISWSLMFKAFFALVPILSFNFFAAVVNQIYDVEIDRINKPDLPLVSGEISIETAWILSIIVALTGLILTIKMKGGPLLVFIYILGLFLGFAYSVPPIRWKQYPFTNFLIIISSHVLLNFTSYYASRAALGLPFELRPSFSFIIAFMTVMGMTIAFAKDISDIEGDKKFGVSTVATKLGAKNMTRLCSGLLLLNYLVSILAGIFWPQAFNSNVMILSHAILAFCLIFQTRELALANYASAPSRQFFEFIWNLYYAEYLVYVFI

SEQ ID NO: 1067 - protein, 323 aa, Artificial Sequence
  Synthetic
MSAGSDQIEGSPHHESDNSIATKILNFGHTCWKLQRPYVVKGLILAACGLFGKELLHNTNLISWSLMFKAFFALVAILSFNFFAAAINQIYDVEIDRINKPDLPLASGEMSIRTAWILSIIVALTGLIVTIKMKGGPLFVCIYIFGLFAGTIYSVPPIRWKQYPFTNFLITISSHVGLAFTSYYASRAALGLPFELRPSFSFIIAFVTVMGLTIAFAKDISDIEGDRKYGVSTLAAKLGARNITRVCSGVLLLNYLVAILAGIIWPFAFNSNVMILSHAILAFCLIFRTRELALANYASAPSRQFFEFIWNLYYAEYLVYVFI

SEQ ID NO: 1068 - protein, 323 aa, Artificial Sequence
  Synthetic
MSAGSDQIEGSPHHESDNSIATKILNFGHTCWKFQRPYTVKGLILIACGLFGKELLHNTNLISWSLMFKAFFALVPILSFNGFAAGINQIYDVEIDRINKPDLPLASGEMSIRTAWILSIIVALTGLIVTIKMKGGPLFFFIYIFGLFAGFAYSVPPIRWKQYPFTNFLIIISSHVGLAFTSYYASRAALGLPFELRPSFSFIIAFMTVMSMAIAIAKDISDIEGDAKYGVSTLATKLGARNATRLCSGVLLLNYLVSILAGIIWPFAFNSNVMILSHAILAFWLIFRTRELALANYASAPSRQFFEFIWKLYYAEYLVYVFI

SEQ ID NO: 1069 - protein, 323 aa, Artificial Sequence
  Synthetic
MSAGSDQIEGSPHHESDNSIATKILNFGHACWKLQRPYVVKGLISIACGLFGKELLHNTNLINWSLMFKAFFALVPILSFNFFAAAINQIYDVEIDRINKPDLPLASGEMSIRTAWILSIIVALTGLIVTIKMKGGPLFVFIYIFGLFAGTAYSVPPIRWKQYPFTAFLITISSHVGLNFTVYYASRAALGLPFELRPSFSFIIAFMTVMGITIAFTKDISDIEGDAKYGVSTLATKLGAKNTTRFCSGVLLLNYLVSILAGIIWPFAFNSNVMILSHAILAFWLIFRTRELALANYASAPSRQFFEFIWNLYYAEYLVYVFI

SEQ ID NO: 1070 - protein, 323 aa, Artificial Sequence
  Synthetic
MSAGSDQIEGSPHHESDNSIATKILNFGHTCWKLQRPYVVKGLISGACGLFGKELLHNTNLISWSLMFKAFFALVPILSFNFFAAAINQIYDVEIDRINKPDLPLASGEISIRTAWILSIIVAVTGLIVTIKMKGGPLLVFIYIFGLFAGAAYSVPPIRWKQYPFTNFLIIISSHVGLAFTSYYASRAALGLPFELRPSFSFIIAFMTVMSMTIAFAKDISDIEGDKKYGVSTVATKLGARNMTRVCSGLLLLNYVVAILAGIIWPFAFNSNVMILSHAILAFVLIFRARELALANYASAPSRQFFEFIWNLYYAEYLVYVFI

SEQ ID NO: 1071 - protein, 323 aa, Artificial Sequence
  Synthetic
MSAGSDQIEGSPHHESDNSIATKILNFGHACWKLQRPYVVKGLISGACSLFGKELLHNTNLISWSLMFKAFFALVPILSFNFFAAAINQIYDVEIDRINKPDLPLVSGELSIRTAWILSIIVALTGLIVTIKMKGGPLLVGIYIFGLFAGFAYSVPPIRWKQYPFTNFLIIVTSHVGLAFTSYYASRAALGLPFELRPSFSFIIAFMTVMGMAIAFAKDISDIEGDKKYGISTVATKLGARNATRVCSGLLLLNYLVSILAGIIWPFAFNSNVMILSHAILAFCLIFRTRELALANYASAPSRQFFEFIWNLYYAEYLVYVFI

SEQ ID NO: 1072 - protein, 323 aa, Artificial Sequence
  Synthetic
MSAGSDQIEGSPHHESDNSIATKILNFGHTFWKLQRPYVVKGVISISCGLFGKELLHNTNLISWSLMFKAFFGLVPILCFNFFAAIVNQIYDVEIDRINKPDLPLVSGEMSIRTAWILSIIVALTGLIITIKMKGGPLFVSIYILGIFLGFLYSVPPIRWKQYPFTNFLIIISSHVGLNFTVYYASRAALGLPFELRPSFSFIIAFMTVFGLTIAFAKDISDIEGDAKYGVSTLATKLGAKNMTWVCSGVLLLNYLVAILAGIIWPFAFNSNVMILSHAILAFCLIFRTRELALANYASAPSRQFFEFIWLLYYAEYLVYVFI

SEQ ID NO: 1073 - protein, 323 aa, Artificial Sequence
  Synthetic
MSAGSDQIEGSPHHESDNSIATKILNFGHAFWKLQRPYVVKGLISIACSLFGKELLHNTNLISWSLMFKAFFALVPILSFNFFAAAMNQIYDVEIDRINKPDLPLVSGEMSIRTAWIISISVALTGLILTIKMKGGPLIVFLYIFGLFAGFAYSVPPIRWKQYPFTNFLITISSHVILAFTSYYASRAALGLPFELRPSFSFIIAFMTVMSMTIAFAKDISDIEGDKKFGVSTLATKLGAKNMTRICSGLLLLNYLVSILAGIIWPFAFNSNVMILSHAILAFCLIFRTRELALANYASAPSRQFFEFIWLLYYAEYLVYVFI

SEQ ID NO: 1074 - protein, 323 aa, Artificial Sequence
  Synthetic
MSAGSDQIEGSPHHESDNSIATKILNFGHACWKLQRPYVVKGLILIACGLFGKELLHNTNLISWSLMFKAFFALVPILLFNGFAAIMNQIYDVEIDRINKPDLPLVSGEMSIRTAWILSIIVALTGLIITIKMKGGPLFVSLYIFGLFAGFAYSVPPIRWKQYPFTNFLITISSHVILNFTVYYASRAALGLPFELRPSFSFIIAFMTVMGITIAFAKDISDIEGDAKYGVSTFATKLGAKNMTRVCSGLLLLNYLVAILAGIIWPFAFNSNVMILSHAILAFWLIFRTRELALANYASAPSRQFFEFIWKLYYAEYLVYVFI

SEQ ID NO: 1075 - protein, 323 aa, Artificial Sequence
  Synthetic
MSAGSDQIEGSPHHESDNSIATKILNFGHACWKLQRPYVVKGLISIACGLFGKELLHNTNLISWSLMFKAFFALVPILSFNGFAAIMNQIYDVEIDRINKPDLPLVSGEMSIRTAWILSIIVALTGLIITIKMKGGPLFTCLYIFGLFAGFAYSVPPIRWKQYPFTNFLITISSHVGLNFTVYYASRAALGLPFELRPSFSFITAFMTVMGMTIAFAKDISDIEGDRKYGVSTMATKLGARNTTRICSGLLLLNYLVAILAGIIWPFAFNSNVMILSHAILAFWLIFRTRELALANYASAPSRQFFEFIWKLYYAEYLVYVFI

SEQ ID NO: 1076 - protein, 323 aa, Artificial Sequence
  Synthetic
MSAGSDQIEGSPHHESDNSIATKILNFGHTCWKLQRPYVVKGLISIACGLFGKELLHNTNLISWSLMFKAFQALVPILSFNGFAAIINQIYDVEIDRINKPDLPLVSGEMSIRTAWILSIIVALTGLIVTIKMKGGPLFVFIYIFGLFLGFAYSVPPIRWKQYPFTAFLIIILSHVGLAFTVYYASRAALGLPFELRPSLSFIIAFMTVMGITIAFAKDISDIEGDAKYGISTFATKLGARNTTRICSGLLLLNYLVAILAGIIWPFAFNSNVMILSHAILAFCLIFRTRELALANYASAPSRQFFEFIWKLYYAEYLVYVFI

SEQ ID NO: 1077 - protein, 323 aa, Artificial Sequence
  Synthetic
MSAGSDQIEGSPHHESDNSIATKILNFGHACWKLQRPYVIKGLISIACGLFGKELLHNTNLISWSLMFKAFFALVPILSFNGFAAIINQIYDVEIDRINKPDLPLVSGEMSIRTAWILSIIVALTGLIVTIKMKGGPLFVFIYIFGLFAGFAYSVPPIRWKQYPFTNFLIIILSHVTLAFTSYYASRAALGLPFELRPSFSFIIAFMTLMGLTIAFAKDISDIEGDAKFGVSTLATKLGAKNMTRICSGILLLNYLVAILAGIIWPFAFNSNVMILSHAILAFWLIFRTRELALANYASAPSRQFFEFIWKLYYAEYLVYVFI

SEQ ID NO: 1078 - protein, 323 aa, Artificial Sequence
  Synthetic
MSAGSDQIEGSPHHESDNSIATKILNFGHACWKLQRPYVVKGLILIACGLFGKELLHNTNLISWSLMFKAFFALVPILSFNFFAAAMNQIYDVEIDRINKPDLPLVSGEMSIRTAWILSIIVALTGLILTIKMKGGPLFVALYIFGLFLGAAYSVPPIRWKQYPFTAFLIIISSHVGLNFTSYYASRAALGLPFELRPSFSFIIAFMTVFGMVIAFAKDISDIEGDAKYGISTVATKLGAKNMTRVCSGLLLLNYLVSILAGIIWPFAFNSNVMILSHAILAFCLIFRTRELALANYASAPSRQFFEFIWNLYYAEYLVYVFI

SEQ ID NO: 1079 - protein, 323 aa, Artificial Sequence
  Synthetic
MSAGSDQIEGSPHHESDNSIATKILNFGHAFWKLQRPYTIKGLISIACGLFGKELLHNTNLISWSLMFKAFFALVPILSFNFFANVVNQIYDVEIDRINKPDLPLVSGEMSIETAWILSIIVALTGLILTIKMKGGPLFTFIYILGLFAGFAYSVPPIRWKQYPFTNFLITISSHVGLAFTVYYASRAALGLPFELRPSFSFIIAFVTVMSMVIAFAKDISDIEGDRKYGVSTLATKLGARNMTRLCSGVLLLNYLGAILAGIIWPQAFNSNVMILSHAILAFCLIFQTRELALANYASAPSRQFFEFIWNLYYAEYLVYVFI

SEQ ID NO: 1080 - protein, 323 aa, Artificial Sequence
  Synthetic
MSAGSDQIEGSPHHESDNSIATKILNFGHACWKLQRPYVVKGLILIACSLFGKELLHNTNLISWSLMFKAFFALVPILLFNFFAAAMNQIYDVEIDRINKPDLPLVSGEMSIRTAWILSIIVALTGLIVTIKMKGGPLFVFLYIFGLFLGFAYSVPPIRWKQYPFTAFLIIISSHVGLAFTSYYASRAALGLPFELRPSFSFIIAFMTVMSMVIAFAKDLSDIEGDAKYGVSTLATKLGARNMTRICSGLLLLNYVVSILAGIIWPFAFNSNVMILSHAILAFCLIFRTRELALANYASAPSRQFFEFIWNLYYAEYLVYVFI

SEQ ID NO: 1081 - protein, 323 aa, Artificial Sequence
  Synthetic
MSAGSDQIEGSPHHESDNSIATKILNFGHTFWKLQRPYVVKGVISGACGLFGKELLHNTNLISWSLMFKAFFALVPILSFNFFAAIVNQIYDVEIDRINKPDLPLASGEMSIRTAWILSIIVALTGLIVTIKMKGGPLLVVLYILGIFAGFAYSVPPIRWKQYPFTNFLITLLSHVGLAFTVYYASRAALGLPFELRPSFSFIIAFMTVMGLVIAFAKDLSDIEGDAKYGVSTLATKLGARTMTWVCSGVLLLNYLGSILAGIIWPFAFNLNVMILSHAILAFCLIFRTRELALANYASAPSRQFFEFIWLLYYAEYLVYVFI

SEQ ID NO: 1082 - skipped

SEQ ID NO: 1083 - DNA, 969 bp, Artificial Sequence
  Synthetic
atgtctgctggctctgaccaaattgaaggttccccgcatcacgaatcagataatagtattgccacaaagatcttaaactttgggcatgcatgttggaaattccaaaggccctacgtcgtcaaaggacttatattgatcgcttgcggtctgttcggaaaggaattactacacaataccaacctaataagctggtccttaatgtttaaagctttcttcgcgttagtgccaatcctaagctttaactttttcgccgccgcaattaaccagatttatgatgttgagatcgacaggataaataagccagatcttccattggtatccggtgaaatgtcaataagaactgcatggatattatctattatcgttgcgctgaccggactgatagtaacaatcaaaatgaaaggcggtcccctgtttatttttttgtatatatttggtttgttcttgggattcgcttactcagtgccacctatcaggtggaagcagtacccattcacgaattttctgatcacgatctctagccacgtcgggttagcgttcacagtttactatgcaagtcgcgccgccttggggcttcctttcgagctccgtccatcgtttagttttatcattgcctttatgaccgtaatgtcaattacgatcgcattcgcaaaggacatttctgacatagagggggatgcaaaatacggtgtctccactttagcgacaaaattaggagctaagaatatgactagagtggtgtccggtttgttattactaaattatgttgtagctatattggctggcatcaattggccgtttgcttttaattccaacgttatgatactgagtcatgctattttggctttttgtctgatttttcggacgcgtgagttggcgcttgcaaactatgcctctgcgcccagcaggcagttttttgaattcatatggaatttgtactatgccgagtatctggtctacgtatttatt

SEQ ID NO: 1084 - DNA, 969 bp, Artificial Sequence
  Synthetic
atgtcagccgggagcgaccagatagaaggaagtcctcatcacgagtctgataactccattgcgacaaaaatcctgaatttcggtcatacgtgctggaagttacaaaggccctatgtcgtgaaaggtatgatttcgatagcttgtggcttgtttggtcgcgaactatttcataataccaaccttttatcttggtcattgatgctcaaggcattctcatccttaatggtaatcctttcttttaatggttttgctgccataatgaatcaaatttacgatgttgagattgaccgaattaacaaaccagatttgccactcgttagtggagagatgagtatcgaaactgcatggatactatcgatcattgtcgctctgacaggcttaatattgactattaagcttaattgtggtccgctatttatatcattgtattgcgtatctttattcgctggatttgcatacagcgttcctccaattcgttggaaacagtatcctttcaccaacttcttaataactatcagctcacacgtgggtgttaactttacatgttattacgcctccagagcagcctttggcttacccttcgaaatgtctccgccatttacttttattctcgcttttatgaccgtaatgggaatgacaatagctttcgcgaaagacatttcagatatcgaaggtgatagaaaatatggggtgtctactgttgctacgaagttaggtgcaagaaatatgacgtttgttgtcagtggtgtcttgttgctgacatacgtaagcgctatacttgcagctatcatttggccgcaagcctttaagtcaaatgtgatgttgttatctcatgccatcctggcgttctgcctaattttccaaactagagagctagcgcttgcaaattatgcttctgcacctagtaggcagttttttgaatttatctggaaattgcattatgcagagtacttagtttatgttttcatc

SEQ ID NO: 1085 - DNA, 969 bp, Artificial Sequence
  Synthetic
atgtcagccgggagcgaccagatagaaggaagtcctcatcacgagtctgataactccattgcgacaaaaatcctgaatttcggtcatacgtgctggaagttacaaaggccctatactgtgaaaggtatgatttcgatagcttgtggcttgtttggtcgcgaactatttcataataccaaccttttatcttggtcattgatgctcaaggcattctcatccttaatggtaatcctttcttttaatgggtttgctgccataatgaatcaaatttacgatgttgagattgaccgaattaacaaaccagatttgccactcgttagtggagagatgagtatcgaaactgcatggatactatcgatcattgtcgctctgacaggcttaatattgactattaagcttaattgtggtccgctatttatatcattgtattgcgtatctttattcgctggatttgcatacagcgttcctccaattcgttggaaacagtatcctttcaccaacttcttaataactatcagctcacacgtgggtgttaactttacatgttattacgcctccagagcagcctttggcttacccttcgaaatgtctccgccatttacttttattctcgcttttatgaccgtaatgggaatgacaatagctttcgcgaaagacatttcagatatcgaaggtgatgcgaaatatggggtgtctactgttgctacgaagttaggtgcaagaaatatgacgtttgttgtcagtggtgtcttgttgctgacatacgtaagcgctatacttgcagctatcatttggccgcaagcctttaagtcaaatgtgatgttgttatctcatgccatcctggcgttctgcctaattttccaaactagagagctagcgcttgcaaattatgcttctgcacctagtaggcagttttttgaatttatctggaaattgcattatgcagagtacttagtttatgttttcatc

SEQ ID NO: 1086 - DNA, 969 bp, Artificial Sequence
  Synthetic
atgtcagccgggagcgaccagatagaaggaagtcctcatcacgagtctgataactccattgcgacaaaaatcctgaatttcggtcatacgtgctggaagttacaaaggccctatgtcgtgaaaggtatgatttcgatagcttgtggcttgtttggtcgcgaactatttcataataccaaccttttatcttggtcattgatgctcaaggcattctcatccttaatggtaatcctttcttttaatggctttgctgccataatgaatcaaatttacgatgttgaaattgaccgaattaacaaaccagatttgccactcgttagtggagagatgagtatcgaaactgcatggatactatcgatcattgtcgctctgacaggcttaatattgactattaagcttaattgtggtccgctatttacttcattgtattgcgtatctttgttcgctggatttgcatacagcgttcctccaattcgttggaaacagtatcctttcaccaacttcttaataactatcagctcacacgtgggtgttaactttacatgttattacgcctccagagcagcctttggcttacccttcgaaatgtctccgccatttacttttattctcgcttttatgaccgtaatgggaatgacaatagctttcgcgaaagacatttcagatatcgaaggtgatgcgaaatatggggtgtctactgttgctacgaagttaggtgcaagaaatatgacgtttgttgtcagtggtgtcttgttgctgacatacgtaagcgctatacttgcagctatcatttggccgcaagcctttaagtcaaatgtgatgttgttatctcatgccatcctggcgttctgcctaattttccaaactagagagctagcgcttgcaaattatgcttctgcacctagtaggcagttttttgaatttatctggaaattgcattatgcagagtacttagtttatgttttcatc

SEQ ID NO: 1087 - DNA, 969 bp, Artificial Sequence
  Synthetic
atgtcagccgggagcgaccagatagaaggaagtcctcatcacgagtctgataactccattgcgacaaaaatcctgaatttcggtcatacgtgctggaagttacaaaggccctatgtcgtgaaaggtatgatttcgatagcttgtggcttgtttggtcgcgaactatttcataataccaaccttttatcttggtcattgatgctcaaggcattctcatccttaatggtaatcctttcttttaatggatttgctgccataatgaatcaaatttacgatgttgagattgaccgaattaacaaaccagatttgccactcgttagtggagagatgagtatcgaaactgcatggatactatcgatcattgtcgctctgacaggcttaatattgactattaagcttaattgtggtccgctatttatatcattgtattgcgtatctttattcgctggatttgcatacagcgttcctccaattcgttggaaacagtatcctttcaccaacttcttaataactatcagctcacacgtgggtgttaactttacatgttattacgcctccagagcagcctttggcttacccttcgaaatgtctccgccatttacttttattctcgcttttatgaccgtaatgggaatgacaatagctttcgcgaaagacatttcagatatcgaaggtgatgcgaaatatggggtgtctactgttgctacgaagttaggtgcaagaaatatgacgtttttggtcagtggtgtcttgttgctgacatacgtaagcgctatacttgcagctatcatttggccgcaagcctttaagtcaaatgtgatgttgttatctcatgccatcctggcgttctgcctaattttccaaactagagagctagcgcttgcaaattatgcttctgcacctagtaggcagttttttgaatttatctggaaattgcattatgcagagtacttagtttatgttttcatc

SEQ ID NO: 1088 - DNA, 969 bp, Artificial Sequence
  Synthetic
atgtcagccgggagcgaccagatagaaggaagtcctcatcacgagtctgataactccattgcgacaaaaatcctgaatttcggtcatacgtgctggaagttacaaaggccctatgtcgtgaaaggtatgatttcgatagcttgtggcttgtttggtcgcgaactatttcataataccaaccttttatcttggtcattgatgctcaaggcattctcatccttaatggtaatcctttcttttaatggatttgctgccataatgaatcaaatttacgatgttgaaattgaccgaattaacaaaccagatttgccactcgttagtggagagatgagtatcgaaactgcatggatactatcgatcattgtcgctctgacaggcttaatattgactattaagcttaattgtggtccgctatttatatcattgtattgcgtatctttgttcgctggatttgcatacagcgttcctccaattcgttggaaacagtatcctttcaccaacttcttaataactatcagctcacacgtgggtgttaactttacatgttattacgcctccagagcagcctttggcttacccttcgaaatgtctccgccatttacttttattctcgcttttatgaccgtaatgggaatgacaatagctttcgcgaaagacatttcagatatcgaaggtgatgcgaaatatggggtgtctactgttgctacgaagttaggtgcaagaaatatgacgtttgttgtcagtggtgtcttgttgctgacatacgtaagcgctatacttgcaggtatcatttggccgcaagcctttaagtcaaatgtgatgttgttatctcatgccatcctggcgttctgcctaattttccaaactagagagctagcgcttgcaaattatgcttctgcacctagtaggcagttttttgaatttatctggaaattgcattatgcagagtacttagtttatgttttcatc

SEQ ID NO: 1089 - DNA, 969 bp, Artificial Sequence
  Synthetic
atgtcagccgggagcgaccagatagaaggaagtcctcatcacgagtctgataactccattgcgacaaaaatcctgaatttcggtcatacgtgctggaagttacaaaggccctatgtcgtgaaaggtatgatttcgatagcttgtggcttgtttggtcgcgaactatttcataataccaaccttttatcttggtcattgatgctcaaggcattctcatccttaatggtaatcctttcttttaatggatttgctgccataatgaatcaaatttacgatgttgaaattgaccgaattaacaaaccagatttgccactcgttagtggagagatgagtatcgaaactgcatggatactatcgatcattgtcgctctgacaggcttaatattgactattaagcttaattgtggtccgctatttatatcattgtattgcgtatctttattcgctggatttgcatacagcgttcctccaattcgttggaaacagtatcctttcaccaacttcttaataactatcagctcacacgtgggtgttaactttacatgttattacgcctccagagcagcctttggcttacccttcgaaatgtctccgccatttacttttattctcgcttttatgaccgtaatgggaatgacaatagctttcgcgaaagacatttcagatatcgaaggtgataagaaatatggggtgtctactgttgctacgaagttaggtgcaagaaatatgacgtttgttgtcagtggtgtcttgttgctgaattacgtaagcgctatacttgcagctatcatttggccgcaagcctttaagtcaaatgtgatgttgttatctcatgccatcctggcgttctgcctaattttccaaactagagagctagcgcttgcaaattatgcttctgcacctagtaggcagttttttgaatttatctggaaattgcattatgcagagtacttagtttatgttttcatc

SEQ ID NO: 1090 - DNA, 969 bp, Artificial Sequence
  Synthetic
atgtcagccgggagcgaccagatagaaggaagtcctcatcacgagtctgataactccattgcgacaaaaatcctgaatttcggtcatacgtgctggaagttacaaaggccctatgtcgtgaaaggtatgatttcgatagcttgtggcttgtttggtcgcgaactatttcataataccaaccttttatcttggtcattgatgctcaaggcattctcatccttaatggtaatcctttcttttaatgggtttgctgccataatgaatcaaatttacgatgttgagattgaccgaattaacaaaccagatttgccactcgttagtggagagatgagtatcgaaactgcatggatactatcgatcattgtcgctctgacaggcttaatattgactattaagcttaattgtggtccgctatttatatcattgtattgcgtatctttattcgctggatttgcatacagcgttcctccaattcgttggaaacagtatcctttcaccaacttcttaataactatcagctcacacgtgggtgttaactttacatgttattacgcctccagagcagcctttggcttacccttcgaaatgtctccgccatttacttttattattgcttttatgaccgtaatgggaatgacaatagctttcgcgaaagacatttcagatatcgaaggtgatgcgaaatatggggtgtctactgttgctacgaagttaggtgcaagaaatatgacgtttgttgtcagtggtgtcttgttgctgacatacgtaagcgctatacttgcagctatcatttggccgcaagcctttaagtcaaatgtgatgttgttatctcatgccatcctggcgttctgcctaattttccaaactagagagctagcgcttgcaaattatgcttctgcacctagtaggcagttttttgaatttatctggaaattgcattatgcagagtacttagtttatgttttcatc

SEQ ID NO: 1091 - DNA, 969 bp, Artificial Sequence
  Synthetic
atgtcagccgggagcgaccagatagaaggaagtcctcatcacgagtctgataactccattgcgacaaaaatcctgaatttcggtcatacgtgctggaagttacaaaggccctatgtcgtgaaaggtatgatttcgatagcttgtggcttgtttggtcgcgaactatttcataataccaaccttttatcttggtcattgatgctcaaggcattctcatccttagttgtaatcctttcttttaatggatttgctgccataatgaatcaaatttacgatgttgagattgaccgaattaacaaaccagatttgccactcgttagtggagagatgagtatcgaaactgcatggatactatcgatcattgtcgctctgacaggcttaatattgactattaagcttaattgtggtccgctatttatatcattgtattgcgtatctttattcgctggatttgcatacagcgttcctccaattcgttggaaacagtatcctttcaccaacttcttaataactatcagctcacacgtgggtgttaactttacatgttattacgcctccagagcagcctttggcttacccttcgaaatgtctccgccatttacttttattctcgcttttatgaccgtaatgggaatgacaatagctttcgcgaaagacatttcagatatcgaaggtgatgcgaaatatggggtgtctactgttgctacgaagttaggtgcaagaaatatgacgtttgttgtcagtggtgtcttgttgctgaattacgtaagcgctatacttgcagctatcatttggccgcaagcctttaagtcaaatgtgatgttgttatctcatgccatcctggcgttctgcctaattttccaaactagagagctagcgcttgcaaattatgcttctgcacctagtaggcagttttttgaatttatctggaaattgcattatgcagagtacttagtttatgttttcatc

SEQ ID NO: 1092 - DNA, 969 bp, Artificial Sequence
  Synthetic
atgtcagccgggagcgaccagatagaaggaagtcctcatcacgagtctgataactccattgcgacaaaaatcctgaatttcggtcatacgtgctggaagttacaaaggccctatgtcgtgaaaggtatgatttcgatagcttgtggcttgtttggtcgcgaactatttcataataccaaccttttatcttggtcattgatgctcaaggcattctcatccttaatggtaatcctttcttttaatggatttgctgccataatgaatcaaatttacgatgttgaaattgaccgaattaacaaaccagatttgccactcgttagtggagagatgagtatcgaaactgcatggatactatcgatcattgtcgctctgacaggcttaatattgactattaagcttaattgtggtccgctatttatatcattgtattgcgtatctttgttcgctggatttgcatacagcgttcctccaattcgttggaaacagtatcctttcaccaacttcttaataactatcagctcacacgtgggtgttaactttacatgttattacgcctccagagcagcctttggcttacccttcgaaatgtctccgccatttacttttattctcgcttttatgaccgtaatgggaatgacaatagctttcgcgaaagacatttcagatatcgaaggtgatgcgaaatatggggtgtctactgttgctacgaagttaggtgcaagaaatatgacgtttgttgtcagtggtgtcttgttgctgttatacgtaagcgctatacttgcagctatcatttggccgcaagcctttaagtcaaatgtgatgttgttatctcatgccatcctggcgttctgcctaattttccaaactagagagctagcgcttgcaaattatgcttctgcacctagtaggcagttttttgaatttatctggaaattgcattatgcagagtacttagtttatgttttcatc

SEQ ID NO: 1093 - DNA, 969 bp, Artificial Sequence
  Synthetic
atgtcagccgggagcgaccagatagaaggaagtcctcatcacgagtctgataactccattgcgacaaaaatcctgaatttcggtcatacgtgctggaagttacaaaggccctatgtcgtgaaaggtatgatttcgatagcttgtggcttgtttggtcgcgaactatttcataataccaaccttttatcttggtcattgatgctcaaggcattctcatccttaatggtaatcctttcttttaatggatttgctgccataatgaatcaaatttacgatgttgagattgaccgaattaacaaaccagatttgccactcgttagtggagagatgagtatcgaaactgcatggatactatcgatcattgtcgctctgacaggcttaatattgactattaagcttaattgtggtccgctatttatatcattgtattgcgtatctctattcgctggatttgcatacagcgttcctccaattcgttggaaacagtatcctttcaccaacttcttaataactatcagctcacacgtgggtgttaactttacatgttattacgcctccagagcagcctttggcttacccttcgaaatgtctccgccatttacttttattctcgcttttatgaccgtaatgggaatgacaatagctttcgcgaaagacatttcagatatcgaaggtgatgcgaaatatggggtgtctactgttgctacgaagttaggtgcaagaaatatgacgtttgttgtcagtggtgtcttgttgctgaattacgtaagcgctatacttgcagctatcatttggccgcaagcctttaagtcaaatgtgatgttgttatctcatgccatcctggcgttctgcctaattttccaaactagagagctagcgcttgcaaattatgcttctgcacctagtaggcagttttttgaatttatctggaaattgcattatgcagagtacttagtttatgttttcatc

SEQ ID NO: 1094 - DNA, 969 bp, Artificial Sequence
  Synthetic
atgtctgctggctctgaccaaattgaaggttccccgcatcacgaatcagataatagtattgccacaaagatcttaaactttgggcatgcgtgttggaaattacaaaggccctacgtcgtcaaaggactgataagcatcgcttgcggtctgttcggaaaggaattacttcataatacgaacctaataagctggtcattaatgttcaaagctttcttcgcgttagtgccaatcctaagctttaactttttcgccgccgcaatgaaccagatttatgatgttgagatcgacaggataaataagccagatcttccattggtatccggtgaaatgtcaatacgtactgcatggatattatctattagtgttgcgctgaccggactgataattacaatcaaaatgaaaggtggccccctgtttgtttcgatatatatatttggtctcttgttgggattcgcttactcagtgccacctatcaggtggaagcagtacccattcacgaattttctgatcattatcttgagccacgtcgggttagcgttcacagtatactatgcatcacgagctgccttggggcttcctttcgagctacgtccatcgtttagttttatcattgcctttatgaccgtaatgtctttagttatcgcattcgcaaaggacatttctgacatagagggggatgcaaaatacggtgtctccactgtggcgacaaaattaggagctaaaaatatgactagagtgtgttccggtttgttattactaaattatctggtatctatattggcaggcatcatatggccgtttgcttttaactccaacgtgatgatactgagtcatgctattttggctttttgtctgttctttcgcacgcgtgagttggcgcttgcaaactatgcctctgcgcccagcaggcagttttttgaattcatatggaatttgtactatgccgagtatctagtctacgtatttatt

SEQ ID NO: 1095 - DNA, 969 bp, Artificial Sequence
  Synthetic
atgtcagccgggagcgaccagatagaaggaagtcctcatcacgagtctgataactccattgcgacaaaaatcctgaatttcggtcatacgtgctggaagttacaaaggccctatgtcgtgaaaggtatgatttcgatagcttgtggcttgtttggtcgcgaactatttcataataccaaccttatttcttggtcattgatgctcaaggcattctcatccttaatggtaatcctttcttttaatggatttgctgccataatgaatcaaatttacgatgttgaaattgaccgaattaacaaaccagatttgccactcgttagtggagagatgagtatcgaaactgcatggatactatcgatcattgtcgctctgacaggcttaatattgactattaagcttaattgtggtccgctatttatatcattgtattgcgtatctttattcgctggatttgcatacagcgttcctccaattcgttggaaacagtatcctttcaccaacttcttaataactatcagctcacacgtgggtgttaactttacatgttattacgcctccagagcagcctttggcttacccttcgaaatgtctccgccatttacttttattctcgcttttatgaccgtaatgggaatgacaatagctttcgcgaaagacatttcagatatcgaaggtgatgcgaaatatggggtgtctactgttgctacgaagttaggtgcaagaaatatgacgtttgttgtcagtggtgtcttgttgctgacatacgtaagcgctatacttgcagctatcatttggccgcaagcctttaagtcaaatgtgatgttgttatctcatgccatcctggcgttctgcctaattttccaaactagagagctagcgcttgcaaattatgcttctgcacctagtaggcagttttttgaatttatctggaaattgcattatgcagagtacttagtttatgttttcatc

SEQ ID NO: 1096 - DNA, 969 bp, Artificial Sequence
  Synthetic
atgtcagccgggagcgaccagatagaaggaagtcctcatcacgagtctgataactccattgcgacaaaaatcctgaatttcggtcatacgtgctggaagttacaaaggccctatgtcgtgaaaggtatgatttcgatagcttgtggcttgtttggtcgcgaactatttcataataccaaccttttatcttggtcattgatgttcaaggcattctcatccttaatggtaatcctttcttttaatggatttgctgccataatgaatcaaatttacgatgttgagattgaccgaattaacaaaccagatttgccactcgttagtggagagatgagtatcgaaactgcatggatactatcgatcattgtcgctctgacaggcttaatattgactattaagcttaattgtggtccgctatttatatcattgtattgcgtatctctcttcgctggatttgcatacagcgttcctccaattcgttggaaacagtatcctttcaccaacttcttaataactatcagctcacacgtgggtgttaactttacatgttattacgcctccagagcagcctttggcttacccttcgaaatgtctccgccatttacttttattctcgcttttatgaccgtaatgggaatgacaatagctttcgcgaaagacatttcagatatcgaaggtgatgcgaaatatggggtgtctactgttgctacgaagttaggtgcaagaaatatgacgtttgttgtcagtggtgtcttgttgctgacatacgtaagcgctatacttgcagctatcatttggccgcaagcctttaagtcaaatgtgatgttgttatctcatgccatcctggcgttctgcctaattttccaaactagagagctagcgcttgcaaattatgcttctgcacctagtaggcagttttttgaatttatctggaaattgcattatgcagagtacttagtttatgttttcatc

SEQ ID NO: 1097 - DNA, 969 bp, Artificial Sequence
  Synthetic
atgtcagccgggagcgaccagatagaaggaagtcctcatcacgagtctgataactccattgcgacaaaaatcctgaatttcggtcatacgtgctggaagttacaaaggccctatgtcgtgaaaggtatgatttcgatagcttgtggcttgtttggtcgcgaactatttcataataccaaccttttatcttggtcattgatgctcaaggcattctcatccttaatggtaatcctttcttttaatggctttgctgccataatgaatcaaatttacgatgttgaaattgaccgaattaacaaaccagatttgccactcgttagtggagagatgagtatcgaaactgcatggatactatcgatcattgtcgctctgacaggcttaatattgactattaagcttaattgtggtccgctatttatatcattgtattgcgtatctcttttcgctggatttgcatacagcgttcctccaattcgttggaaacagtatcctttcaccaacttcttaataactatcagctcacacgtgggtgttaactttacatgttattacgcctccagagcagcctttggcttacccttcgaaatgtctccgccatttacttttattctcgcttttatgaccgtaatgggaatgacaatagctttcgcgaaagacatttcagatatcgaaggtgatgcgaaatatggggtgtctactgttgctacgaagttaggtgcaagaaatatgacgtttgttgtcagtggtgtcttgttgctgaattacgtaggggctatacttgcagctatcatttggccgcaagcctttaagtcaaatgtgatgttgttatctcatgccatcctggcgttctgcctaattttccaaactagagagctagcgcttgcaaattatgcttctgcacctagtaggcagttttttgaatttatctggaaattgcattatgcagagtacttagtttatgttttcatc

SEQ ID NO: 1098 - DNA, 969 bp, Artificial Sequence
  Synthetic
atgtcagccgggagcgaccagatagaaggaagtcctcatcacgagtctgataactccattgcgacaaaaatcctgaatttcggtcatacgtgctggaagttacaaaggccctatgtcgtgaaaggtatgatttcgatagcttgtggcttgtttggtcgcgaactatttcataataccaaccttttatcttggtcattgatgctcaaggcattctcatccttaatggtaatcctttcttttaatggctttgctgccataatgaatcaaatttacgatgttgaaattgaccgaattaacaaaccagatttgccactcgttagtggagagatgagtatcgaaactgcatggatactatcgatcattgtcgctctgacaggcttaatattgactattaagcttaattgtggtccgctatttatatcattgtattgcgtatctttattcgctggatttgcatacagcgttcctccaattcgttggaaacagtatcctttcaccaacttcttaataactttcagctcacacgtgggtgttaactttacatgttattacgcctccagagcagcctttggcttacccttcgaaatgtctccgccatttacttttattctcgcttttatgaccgtaatgggaatgacaatagctttcgcgaaagacatttcagatatcgaaggtgatgcgaaatatggggtgtctactgttgctacgaagttaggtgcaagaaatatgacgtttgttgtcagtggtgtcttgttgctgacatacgtaagcgctatacttgcagctatcatttggccgcaagcctttaagtcaaatgtgatgttgttatctcatgccatcctggcgttctgcctaattttccaaactagagagctagcgcttgcaaattatgcttctgcacctagtaggcagttttttgaatttatctggaaattgcattatgcagagtacttagtttatgttttcatc

SEQ ID NO: 1099 - DNA, 969 bp, Artificial Sequence
  Synthetic
atgtcagccgggagcgaccagatagaaggaagtcctcatcacgagtctgataactccattgcgacaaaaatcctgaatttcggtcatacgtgctggaagttacaaaggccctatgtcgtgaaaggtatgatttcgatagcttgtggcttgtttggtcgcgaactatttcataataccaaccttttatcttggtcattgatgctcaaggcattctcatccttaatggtaatcctttcttttaatgggtttgctgccataatgaatcaaatttacgatgttgaaattgaccgaattaacaaaccagatttgccactcgttagtggagagatgagtatcgaaactgcatggatactatcgatcattgtcgctctgacaggcttaatattgactattaagcttaattgtggtccgctatttatatcattgtattgcgtatctttgttcgctggatttgcatacagcgttcctccaattcgttggaaacagtatcctttcaccaacttcttaataactatcagctcacacgtgggtgttaactttacatgttattacgcctccagagcagcctttggcttacccttcgaaatgtctccgccatttacttttattctcgcttttatgaccgtaatgggaatggttatagctttcgcgaaagacatttcagatatcgaaggtgatgcgaaatatggggtgtctactgttgctacgaagttaggtgcaagaaatatgacgtttgttgtcagtggtgtcttgttgctgaattacgtaagcgctatacttgcagctatcatttggccgcaagcctttaagtcaaatgtgatgttgttatctcatgccatcctggcgttctgcctaattttccaaactagagagctagcgcttgcaaattatgcttctgcacctagtaggcagttttttgaatttatctggaaattgcattatgcagagtacttagtttatgttttcatc

SEQ ID NO: 1100 - DNA, 969 bp, Artificial Sequence
  Synthetic
atgtcagccgggagcgaccagatagaaggaagtcctcatcacgagtctgataactccattgcgacaaaaatcctgaatttcggtcatacgtgctggaagttacaaaggccctatgtcgtgaaaggtatgatttcgatagcttgtggcttgtttggtcgcgaactatttcataataccaaccttttatcttggtcattgatgctcaaggcattctcatccttaatggtaatcctttcttttaatggatttgctgccataatgaatcaaatttacgatgttgaaattgaccgaattaacaaaccagatttgccactcgttagtggagagatgagtatcgaaactgcatggatactatcgatcattgtcgctctgacaggcttaatattgactattaagcttaattgtggtccgctatttatatcattgtattgcgtatctctattcgctggatttgcatacagcgttcctccaattcgttggaaacagtatcctttcaccaacttcttaataactctgagctcacacgtgggtgttaactttacatgttattacgcctccagagcagcctttggcttacccttcgaaatgtctccgccatttacttttattctcgcttttatgaccgtaatgggaatgacaatagctttcgcgaaagacatttcagatatcgaaggtgatgcgaaatatggggtgtctactgttgctacgaagttaggtgcaagaaatatgacgtttgttgtcagtggtgtcttgttgctgacatacgtaagcgctatacttgcagctatcatttggccgcaagcctttaagtcaaatgtgatgttgttatctcatgccatcctggcgttctgcctaattttccaaactagagagctagcgcttgcaaattatgcttctgcacctagtaggcagttttttgaatttatctggaaattgcattatgcagagtacttagtttatgttttcatc

SEQ ID NO: 1101 - DNA, 969 bp, Artificial Sequence
  Synthetic
atgtcagccgggagcgaccagatagaaggaagtcctcatcacgagtctgataactccattgcgacaaaaatcctgaatttcggtcatacgtgctggaagttacaaaggccctatgtcgtgaaaggtatgatttcgatagcttgtggcttgtttggtcgcgaactatttcataataccaaccttttatcttggtcattgatgctcaaggcattctcatccttaatggtaatcctttcttttaatggatttgctgccataatgaatcaaatttacgatgttgaaattgaccgaattaacaaaccagatttgccactcgttagtggagagatgagtatcgaaactgcatggatactatcgatcattgtcgctctgacaggcttaatattgactattaagcttaattgtggtccgctatttatatcattgtattgcgtatctttgttcgctggatttgcatacagcgttcctccaattcgttggaaacagtatcctttcaccaacttcttaataactatcagctcacacgtgggtgttaactttacatgttattacgcctccagagcagcctttggcttacccttcgaaatgtctccgccatttacttttattctcgcttttatgaccgtaatgggaatgacaatagctttcgcgaaagacatttcagatatcgaaggtgatgcgaaatatggggtgtctactgttgctacgaagttaggtgcaagaaatatgacgtttgttgtcagtggtatcttgttgctgaattacgtaagcgctatacttgcagctatcatttggccgcaagcctttaagtcaaatgtgatgttgttatctcatgccatcctggcgttctgcctaattttccaaactagagagctagcgcttgcaaattatgcttctgcacctagtaggcagttttttgaatttatctggaaattgcattatgcagagtacttagtttatgttttcatc

SEQ ID NO: 1102 - DNA, 969 bp, Artificial Sequence
  Synthetic
atgtcagccgggagcgaccagatagaaggaagtcctcatcacgagtctgataactccattgcgacaaaaatcctgaatttcggtcatacgtgctggaagttacaaaggccctatgtcgtgaaaggtatgatttcgatagcttgtggcttgtttggtcgcgaactatttcataataccaaccttttatcttggtcattgatgctcaaggcattctcatccttaatggtaatcctttcttttaatggatttgctgccataatgaatcaaatttacgatgttgaaattgaccgaattaacaaaccagatttgccactcgttagtggagagatgagtatcgaaactgcatggatactatcgatcattgtcgctctgacaggcttaatattgactattaagcttaattgtggtccgctatttatatcattgtattgcgtatctctgttcgctggatttgcatacagcgttcctccaattcgttggaaacagtatcctttcaccaacttcttaataactatcagctcacacgtgggtgttaactttacatgttattacgcctccagagcagcctttggcttacccttcgaaatgtctccgccatttacttttattctcgcttttatgaccgtaatgggaatgacaatagctttcgcgaaagacatttcagatatcgaaggtgatgcgaaatatggggtgtctactgttgctacgaagttaggtgcaaagaatatgacgtttgttgtcagtggtgtcttgttgctgacatacgtaagcgctatacttgcagctatcatttggccgcaagcctttaagtcaaatgtgatgttgttatctcatgccatcctggcgttctgcctaattttccaaactagagagctagcgcttgcaaattatgcttctgcacctagtaggcagttttttgaatttatctggaaattgcattatgcagagtacttagtttatgttttcatc

SEQ ID NO: 1103 - DNA, 969 bp, Artificial Sequence
  Synthetic
atgtcagccgggagcgaccagatagaaggaagtcctcatcacgagtctgataactccattgcgacaaaaatcctgaatttcggtcatacgtgctggaagttacaaaggccctatgtcgtgaaaggtatgatttcgatagcttgtggcttgtttggtcgcgaactatttcataataccaaccttttatcttggtcattgatgctcaaggcattctcatccttaatggtaatcctttcttttaatggatttgctgccataatgaatcaaatttacgatgttgagattgaccgaattaacaaaccagatttgccactcgttagtggagagatgagtatcgaaactgcatggatactatcgatcattgtcgctctgacaggcttaatattgactattaagcttaattgtggtccgctatttatatcattgtattgcgtatctttattcgctggatttgcatacagcgttcctccaattcgttggaaacagtatcctttcaccaacttcttaataactatcagctcacacgtgggtgttaactttacatgttattacgcctccagagcagcctttggcttacccttcgaaatgtctccgccatttacttttattctcgcttttatgaccgtaatgggaatgacaatagctttcgcgaaagacatttcagatatcgaaggtgatgcgaaatatggggtgtctactgttgctacgaagttaggtgcaagaaatatgacgtttgttgtcagtggtgtcttgttgctgacatacgtaagcgctatacttgcagctatcatttggccgcaagcctttaagtcaaatgtgatgatcttatctcatgccatcctggcgttctgcctaattttccaaactagagagctagcgcttgcaaattatgcttctgcacctagtaggcagttttttgaatttatctggaaattgcattatgcagagtacttagtttatgttttcatc

SEQ ID NO: 1104 - DNA, 969 bp, Artificial Sequence
  Synthetic
atgtcagccgggagcgaccagatagaaggaagtcctcatcacgagtctgataactccattgcgacaaaaatcctgaatttcggtcatacgtgctggaagttacaaaggccctatgtcgtgaaaggtatgatttcgatagcttgtggcttgtttggtcgcgaactatttcataataccaaccttttatcttggtcattgatgctcaaggcattctcatccttaatggtaatcctttcttttaatggatttgctgccataatgaatcaaatttacgatgttgaaattgaccgaattaacaaaccagatttgccactcgttagtggagagatgagtatcgaaactgcatggatactatcgatcattgtcgctctgacaggcttaatattgactattaagcttaattgtggtccgctatttatatcattgtattgcgtatctttgttcgctggatttgcatacagcgttcctccaattcgttggaaacagtatcctttcaccaacttcttaataactatcagctcacacgtgggtgttaactttacatgttattacgcctccagagcagcctttggcttacccttcgaaatgtctccgccatttacttttattctcgcttttatgaccgtaatgggaatgacaatagctttcgcgaaagacatttcagatatcgaaggtgatgcgaaatatggggtgtctactgttgctacgaagttaggtgcaagaaatatgacgtttgttgtcagtggtaccttgttgctgaattacgtaagcgctatacttgcagctatcatttggccgcaagcctttaagtcaaatgtgatgttgttatctcatgccatcctggcgttctgcctaattttccaaactagagagctagcgcttgcaaattatgcttctgcacctagtaggcagttttttgaatttatctggaaattgcattatgcagagtacttagtttatgttttcatc

SEQ ID NO: 1105 - DNA, 969 bp, Artificial Sequence
  Synthetic
atgtcagccgggagcgaccagatagaaggaagtcctcatcacgagtctgataactccattgcgacaaaaatcctgaatttcggtcatacgtgctggaagttacaaaggccctatgtcgtgaaaggtatgatttcgatagcttgtggcttgtttggtcgcgaactatttcataataccaaccttttatcttggtcattgatgctcaaggcattctcatccttaatggtaatcctttcttttaatggatttgctgccataatgaatcaaatttacgatgttgaaattgaccgaattaacaaaccagatttgccactcgttagtggagagatgagtatcgaaactgcatggatactatcgatcattgtcgctctgacaggcttaatattgactattaagcttaattgtggtccgctatttatatcattgtattgcgtatctttattcgctggatttgcatacagcgttcctccaattcgttggaaacagtatcctttcaccaacttcttaataactatcagctcacacgtgggtgttaactttacatgttattacgcctccagagcagcctttggcttacccttcgaaatgtctccgccatttacttttattctcgcttttatgaccgtaatgggaatgacaatagctttcgcgaaagacatttcagatatcgaaggtgatgcgaaatatggggtgtctactgttgctacgaagttaggtgcaagaaatatgacgtttgttgtcagtggtgtcttgttgctgacatacgtaagcgctataattgcagctatcatttggccgcaagcctttaagtcaaatgtgatgttgttatctcatgccatcctggcgttctgcctaattttccaaactagagagctagcgcttgcaaattatgcttctgcacctagtaggcagttttttgaatttatctggaaattgcattatgcagagtacttagtttatgttttcatc

SEQ ID NO: 1106 - DNA, 969 bp, Artificial Sequence
  Synthetic
atgtcagccgggagcgaccagatagaaggaagtcctcatcacgagtctgataactccattgcgacaaaaatcctgaatttcggtcatacgtgctggaagttacaaaggccctatgtcgtgaaaggtatgatttcgatagcttgtggcttgtttggtcgcgaactatttcataataccaaccttttatcttggtcattgatgctcaaggcattctcatccttaatggtaatcctttcttttaatggctttgctgccataatgaatcaaatttacgatgttgaaattgaccgaattaacaaaccagatttgccactcgttagtggagagatgagtatcgaaactgcatggatactatcgatcattgtcgctctgacaggcttaatattgactattaagcttaattgtggtccgctatttatatcattgtattgcgtatctttattcgctggatttgcatacagcgttcctccaattcgttggaaacagtatcctttcaccaacttcttaataactatcagctcacacgtgggtgttaactttacatgttattacgcctccagagcagcctttggcttacccttcgaaatgtctccggcttttacttttattctcgcttttatgaccgtaatgggaatgacaatagctttcgcgaaagacatttcagatatcgaaggtgatgcgaaatatggggtgtctactgttgctacgaagttaggtgcaagaaatatgacgtttgttgtcagtggtgtcttgttgctgacatacgtaagcgctatacttgcagctatcatttggccgcaagcctttaagtcaaatgtgatgttgttatctcatgccatcctggcgttctgcctaattttccaaactagagagctagcgcttgcaaattatgcttctgcacctagtaggcagttttttgaatttatctggaaattgcattatgcagagtacttagtttatgttttcatc

SEQ ID NO: 1107 - DNA, 969 bp, Artificial Sequence
  Synthetic
atgtcagccgggagcgaccagatagaaggaagtcctcatcacgagtctgataactccattgcgacaaaaatcctgaatttcggtcatacgtgctggaagttacaaaggccctatgtcgtgaaaggtatgatttcgatagcttgtggcttgtttggtcgcgaactatttcataataccaaccttttatcttggtcattgatgctcaaggcattctcatccttaatggtaatcctttcttttaatggatttgctgccataatgaatcaaatttacgatgttgagattgaccgaattaacaaaccagatttgccactcgttagtggagagatgagtatcgaaactgcatggatactatcgatcattgtcgctctgacaggcttaatattgactattaagcttaattgtggtccgctatttatatcattgtattgcgtatctttattcgctggatttgcatacagcgttcctccaattcgttggaaacagtatcctttcaccaacttcttaataactatcagctcacacgtgggtgttaactttacatgttattacgcctccagagcagcctttggcttacccttcgaactatctccgccatttacttttattctcgcttttatgaccgtaatgggaatgacaatagctttcgcgaaagacatttcagatatcgaaggtgatgcgaaatatggggtgtctactgttgctacgaagttaggtgcaagaaatatgacgtttgttgtcagtggtgtcttgttgctgacatacgtaagcgctatacttgcagctatcatttggccgcaagcctttaagtcaaatgtgatgttgttatctcatgccatcctggcgttctgcctaattttccaaactagagagctagcgcttgcaaattatgcttctgcacctagtaggcagttttttgaatttatctggaaattgcattatgcagagtacttagtttatgttttcatc

SEQ ID NO: 1108 - DNA, 969 bp, Artificial Sequence
  Synthetic
atgtcagccgggagcgaccagatagaaggaagtcctcatcacgagtctgataactccattgcgacaaaaatcctgaatttcggtcatacgtgctggaagttacaaaggccctatgtcgtgaaaggtatgatttcgatagcttgtggcttgtttggtcgcgaactatttcataataccaaccttttatcttggtcattgatgctcaaggcattctcatccttaatggtaatcctttcttttaatggatttgctgccataatgaatcaaatttacgatgttgagattgaccgaattaacaaaccagatttgccactcgttagtggagagatgagtatcgaaactgcatggctgctatcgatcattgtcgctctgacaggcttaatattgactattaagcttaattgtggtccgctatttatatcattgtattgcgtatctttattcgctggatttgcatacagcgttcctccaattcgttggaaacagtatcctttcaccaacttcttaataactatcagctcacacgtgggtgttaactttacatgttattacgcctccagagcagcctttggcttacccttcgaaatgtctccgccatttacttttattctcgcttttatgaccgtaatgggaatgacaatagctttcgcgaaagacatttcagatatcgaaggtgatgcgaaatatggggtgtctactgttgctacgaagttaggtgcaagaaatatgacgtttgttgtcagtggtgtcttgttgctgacatacgtaagcgctatacttgcagctatcatttggccgcaagcctttaagtcaaatgtgatgttgttatctcatgccatcctggcgttctgcctaattttccaaactagagagctagcgcttgcaaattatgcttctgcacctagtaggcagttttttgaatttatctggaaattgcattatgcagagtacttagtttatgttttcatc

SEQ ID NO: 1109 - DNA, 969 bp, Artificial Sequence
  Synthetic
atgtcagccgggagcgaccagatagaaggaagtcctcatcacgagtctgataactccattgcgacaaaaatcctgaatttcggtcatacgtgctggaagttacaaaggccctatgtcgtgaaaggtatgatttcgatagcttgtggcttgtttggtcgcgaactatttcataataccaaccttttatcttggtcattgatgctcaaggcattctcatccttaatggtaatcctttcttttaatggatttgctgccataatgaatcaaatttacgatgttgagattgaccgaattaacaaaccagatttgccactcgttagtggagagatgagtatcgaaactgcatggatactatcgatcattgtcgctctgacaggcttaatattgactattaagcttaattgtggtccgctatttatatcattgtattgcgtatctttattcgctggatttgcatacagcgttcctccaattcgttggaaacagtatcctttcaccaacttcttaataactatcagctcacacgtgggtgttaactttacatgttattacgcctccagagcagcctttggcttacccttcgaaatgtctccgccatttacttttattctcgcttttatgaccgtaatgggaatgacaatagctttcgcgaaagacatttcagatatcgaaggtgatgcgaaatatggggtgtctactgttgctacgaagttaggtgcaagaaatatgacgtttgttgtcagtggtgtcttgttgctgacatacgtaagcgctatacttgcagctatcatttggccgcaagcctttaagtcaaatgtgatgttgttatctcatgccatcctggcgttctggctaattttccaaactagagagctagcgcttgcaaattatgcttctgcacctagtaggcagttttttgaatttatctggaaattgcattatgcagagtacttagtttatgttttcatc

SEQ ID NO: 1110 - DNA, 969 bp, Artificial Sequence
  Synthetic
atgtcagccgggagcgaccagatagaaggaagtcctcatcacgagtctgataactccattgcgacaaaaatcctgaatttcggtcatacgtgctggaagttacaaaggccctatgtcgtgaaaggtatgatttcgatagcttgtggcttgtttggtcgcgaactatttcataataccaaccttttatcttggtcattgatgctcaaggcattctcatccttaatggtaatcctttcttttaatggatttgctgccataatgaatcaaatttacgatgttgaaattgaccgaattaacaaaccagatttgccactcgttagtggagagatgagtatcgaaactgcatggatactatcgatcattgtcgctctgacaggcttaatattgactattaagcttaattgtggtccgctatttatatcattgtattgcgtatctttattcgctggatttgcatacagcgttcctccaattcgttggaaacagtatcctttcaccaacttcttaataactatcagctcacacgtgggtgttaactttacatgttattacgcctccagagcagcctttggcttacccttcgaaatgtctccgccatttacttttattctcgcttttatgaccgtaatgggaatgacaatagctttcgcgaaagacatttcagatatcgaaggtgatgcgaaatatggggtgtctactgttgctacgaagttaggtgcaagaaatatgacgtttgttgtcagtggtatcttgttgctgacatacgtaagcgctatacttgcagctatcatttggccgcaagcctttaagtcaaatgtgatgttgttatctcatgccatcctggcgttctgcctaattttccaaactagagagctagcgcttgcaaattatgcttctgcacctagtaggcagttttttgaatttatctggaaattgcattatgcagagtacttagtttatgttttcatc

SEQ ID NO: 1111 - DNA, 969 bp, Artificial Sequence
  Synthetic
atgtcagccgggagcgaccagatagaaggaagtcctcatcacgagtctgataactccattgcgacaaaaatcctgaatttcggtcatacgtgctggaagttacaaaggccctatgtcgtgaaaggtatgatttcgatagcttgtggcttgtttggtcgcgaactatttcataataccaaccttttatcttggtcattgatgctcaaggcattctcatccttaatggtaatcctttcttttaatggatttgctgccataatgaatcaaatttacgatgttgaaattgaccgaattaacaaaccagatttgccactcgttagtggagagatgagtatcgaaactgcatggatactatcgatcattgtcgctctgacaggcttaatattgactattaagcttaattgtggtccgctatttatatcattgtattgcgtatctttattcgctggatttgcatacagcgttcctccaattcgttggaaacagtatcctttcaccaacttcttaataactatcagctcacacgtgggtgttaactttacatgttattacgcctccagagcagcctttggcttacccttcgaaatgtctccgccatttacttttattctcgcttttatgaccgtaatgggaatgacaatagctttcgcgaaagacatttcagatatcgaaggtgataaaaaatatggggtgtctactgttgctacgaagttaggtgcaagaaatatgacgtttgttgtcagtggtgtcttgttgctgacatacgtaagcgctatacttgcagctatcatttggccgcaagcctttaagtcaaatgtgatgttgttatctcatgccatcctggcgttctgcctaattttccaaactagagagctagcgcttgcaaattatgcttctgcacctagtaggcagttttttgaatttatctggaaattgcattatgcagagtacttagtttatgttttcatc

SEQ ID NO: 1112 - DNA, 969 bp, Artificial Sequence
  Synthetic
atgtcagccgggagcgaccagatagaaggaagtcctcatcacgagtctgataactccattgcgacaaaaatcctgaatttcggtcatacgtgctggaagttacaaaggccctatgtcgtgaaaggtatgatttcgatagcttgtggcttgtttggtcgcgaactatttcataataccaaccttttatcttggtcattgatgctcaaggcattctcatccttaatggtaatcctttcttttaatggctttgctgccataatgaatcaaatttacgatgttgaaattgaccgaattaacaaaccagatttgccactcgttagtggagagatgagtatcgaaactgcatggatactatcgatcattgtcgctctgacaggcttaatattgactattaagcttaattgtggtccgctatttatatcattgtattgcgtatctctgttcgctggaatcgcatacagcgttcctccaattcgttggaaacagtatcctttcaccaacttcttaataactatcagctcacacgtgggtgttaactttacatgttattacgcctccagagcagcctttggcttacccttcgaaatgtctccgccatttacttttattctcgcttttatgaccgtaatgggaatgacaatagctttcgcgaaagacatttcagatatcgaaggtgatgcgaaatatggggtgtctactgttgctacgaagttaggtgcaagaaatatgacgtttgttgtcagtggtgtcttgttgctgacatacgtaagcgctatacttgcagctatcatttggccgcaagcctttaagtcaaatgtgatgttgttatctcatgccatcctggcgttctgcctaattttccaaactagagagctagcgcttgcaaattatgcttctgcacctagtaggcagttttttgaatttatctggaaattgcattatgcagagtacttagtttatgttttcatc

SEQ ID NO: 1113 - DNA, 969 bp, Artificial Sequence
  Synthetic
atgtcagccgggagcgaccagatagaaggaagtcctcatcacgagtctgataactccattgcgacaaaaatcctgaatttcggtcatacgtgctggaagttacaaaggccctatgtcgtgaaaggtatgatttcgatagcttgtggcttgtttggtcgcgaactatttcataataccaaccttttatcttggtcattgatgctcaaggcattctcatccttaatggtaatcctttcttttaatggatttgctgccataatgaatcaaatttacgatgttgagattgaccgaattaacaaaccagatttgccactcgttagtggagagatgagtatcgaaactgcatggatactatcgatcattgtcgctctgacaggcttaatattgactattaagcttaattgtggtccgctatttatatcattgtattgcgtatctttattcgctggatttgcatacagcgttcctccaattcgttggaaacagtatcctttcaccaacttcttaataactatcagctcacacgtgggtgttaactttacatgttattacgcctccagagcagcctttggcttacccttcgaaatgtctccgccatttacttttattctcgcttttatgaccttaatgggaatgacaatagctttcgcgaaagacatttcagatatcgaaggtgatgcgaaatatggggtgtctactgttgctacgaagttaggtgcaagaaatatgacgtttgttgtcagtggtgtcttgttgctgacatacgtaagcgctatacttgcagctatcatttggccgcaagcctttaagtcaaatgtgatgttgttatctcatgccatcctggcgttctgcctaattttccaaactagagagctagcgcttgcaaattatgcttctgcacctagtaggcagttttttgaatttatctggaaattgcattatgcagagtacttagtttatgttttcatc

SEQ ID NO: 1114 - DNA, 969 bp, Artificial Sequence
  Synthetic
atgtcagccgggagcgaccagatagaaggaagtcctcatcacgagtctgataactccattgcgacaaaaatcctgaatttcggtcatacgtgctggaagttacaaaggccctatgtcgtgaaaggtatgatttcgatagcttgtggcttgtttggtcgcgaactatttcataataccaaccttttatcttggtcattgatgctcaaggcattctcatccttaatggtaatcctttcttttaatggatttgctgccataatgaatcaaatttacgatgttgaaattgaccgaattaacaaaccagatttgccactcgttagtggagagatgagtatcgaaactgcatggatactatcgatcattgtcgctctgacaggcttaatattgactattaagcttaattgtggtccgctatttatatcattgtattgcgtatctttattcgctggatttatctacagcgttcctccaattcgttggaaacagtatcctttcaccaacttcttaataactatcagctcacacgtgggtgttaactttacatgttattacgcctccagagcagcctttggcttacccttcgaaatgtctccgccatttacttttattctcgcttttatgaccgtaatgggaatgacaatagctttcgcgaaagacatttcagatatcgaaggtgatgcgaaatatggggtgtctactgttgctacgaagttaggtgcaagaaatatgacgtttgttgtcagtggtgtcttgttgctgacatacgtaagcgctatacttgcagctatcatttggccgcaagcctttaagtcaaatgtgatgttgttatctcatgccatcctggcgttctgcctaattttccaaactagagagctagcgcttgcaaattatgcttctgcacctagtaggcagttttttgaatttatctggaaattgcattatgcagagtacttagtttatgttttcatc

SEQ ID NO: 1115 - DNA, 969 bp, Artificial Sequence
  Synthetic
atgtcagccgggagcgaccagatagaaggaagtcctcatcacgagtctgataactccattgcgacaaaaatcctgaatttcggtcatacgtgctggaagttacaaaggccctatgtcgtgaaaggtatgatttcgatagcttgtggcttgtttggtcgcgaactatttcataataccaaccttttatcttggtcattgatgctcaaggcattctcatccttaatggtaatcctttcttttaatggatttgctgccataatgaatcaaatttacgatgttgagattgaccgaattaacaaaccagatttgccactcgttagtggagagatgagtatcgaaactgcatggatactatcgatcattgtcgctctgacaggcttaatattgactattaagcttaattgtggtccgctatttatatcattgtattgcgtatctttattcgctggatttgcatacagcgttcctccaattcgttggaaacagtatcctttcaccaacttcttaataactatcagctcacacgtgggtgttaactttacatgttattacgcctccagagcagcctttggcttacccttcgaaatgtctccgccatttacttttattctcgcttttatgaccgtaatgggaatgacaatagctttcgcgaaagacatttcagatatcgaaggtgatgcgaaatatggggtgtctactgttgctacgaagttaggtgcaagaaatatgacgtttgttgtcagtggtgtcttgttgctgacatacgtaggcgctatacttgcagctatcatttggccgcaagcctttaagtcaaatgtgatgttgttatctcatgccatcctggcgttctgcctaattttccaaactagagagctagcgcttgcaaattatgcttctgcacctagtaggcagttttttgaatttatctggaaattgcattatgcagagtacttagtttatgttttcatc

SEQ ID NO: 1116 - DNA, 969 bp, Artificial Sequence
  Synthetic
atgtcagccgggagcgaccagatagaaggaagtcctcatcacgagtctgataactccattgcgacaaaaatcctgaatttcggtcatacgtgctggaagttacaaaggccctatgtcgtgaaaggtatgatttcgatagcttgtggcttgtttggtcgcgaactatttcataataccaaccttttatcttggtcattgatgctcaaggcattctcatccttaatggtaatcctttcttttaatggatttgctgccataatgaatcaaatttacgatgttgagattgaccgaattaacaaaccagatttgccactcgttagtggagagatgagtatcgaaactgcatggatactatcgatcattgtcgctctgacaggcttaatattgactattaagcttaattgtggtccgctatttttgtcattgtattgcgtatctctcttcgctggatttgcatacagcgttcctccaattcgttggaaacagtatcctttcaccaacttcttaataactatcagctcacacgtgggtgttaactttacatgttattacgcctccagagcagcctttggcttacccttcgaaatgtctccgccatttacttttattctcgcttttatgaccgtaatgggaatgacaatagctttcgcgaaagacatttcagatatcgaaggtgatgcgaaatatggggtgtctactgttgctacgaagttaggtgcaagaaatatgacgtttgttgtcagtggtgtcttgttgctgacatacgtaagcgctatacttgcagctatcatttggccgcaagcctttaagtcaaatgtgatgttgttatctcatgccatcctggcgttctgcctaattttccaaactagagagctagcgcttgcaaattatgcttctgcacctagtaggcagttttttgaatttatctggaaattgcattatgcagagtacttagtttatgttttcatc

SEQ ID NO: 1117 - DNA, 969 bp, Artificial Sequence
  Synthetic
atgtcagccgggagcgaccagatagaaggaagtcctcatcacgagtctgataactccattgcgacaaaaatcctgaatttcggtcatacgtgctggaagttacaaaggccctatgtcgtgaaaggtatgatttcgatagcttgtggcttgtttggtcgcgaactatttcataataccaaccttttatcttggtcattgatgctcaaggcattctcatccttaatggtaatcctttcttttaatggatttgctgccataatgaatcaaatttacgatgttgagattgaccgaattaacaaaccagatttgccactcgttagtggagagatgagtatcgaaactgcatggatactatcgatcattgtcgctctgacaggcttaatattgactattaagcttaattgtggtccgctatttatatcattgtattgcgtatctctcttcgctggatttgcatacagcgttcctccaattcgttggaaacagtatcctttcaccaacttcttaataactatcagctcacacgtgggtgttaactttacatgttattacgcctccagagcagcctttggcttacccttcgaaatgtctccgccatttacttttattctcgcttttatgaccgtaatgggaatgacaatagctttcgcgaaagacatttcagatatcgaaggtgatgcgaaatatggggtgtctactgttgctacgaagttaggtgcaagaaatatgacgtttgttgtcagtggtgtcttgttgctgacatacgtaagcgctatacttgcagctatcttctggccgcaagcctttaagtcaaatgtgatgttgttatctcatgccatcctggcgttctgcctaattttccaaactagagagctagcgcttgcaaattatgcttctgcacctagtaggcagttttttgaatttatctggaaattgcattatgcagagtacttagtttatgttttcatc

SEQ ID NO: 1118 - DNA, 969 bp, Artificial Sequence
  Synthetic
atgtcagccgggagcgaccagatagaaggaagtcctcatcacgagtctgataactccattgcgacaaaaatcctgaatttcggtcatacgtgctggaagttacaaaggccctatgtcgtgaaaggtatgatttcgatagcttgtggcttgtttggtcgcgaactatttcataataccaaccttttatcttggtcattgatgctcaaggcattctcatccttaatggtaatcctttcttttaatgggtttgctgccataatgaatcaaatttacgatgttgaaattgaccgaattaacaaaccagatttgccactcgttagtggagagatgagtatcgaaactgcatggatactatcgatcattgtcgctctgacaggcttaatattgactattaagcttaattgtggtccgctatttatatcattgtattgcgtatctttattcgctggatttgcatacagcgttcctccaattcgttggaaacagtatcctttcaccaacttcttaataactatcagctcacacgtgggtgttaactttacatgttattacgcctccagagcagcctttggcttacccttcgaaatgtctccgccatttacttttattctcgcttttatgaccgtaatgggaatgacaatagctttcgcgaaagacatttcagatatcgaaggtgatgcgaaatatggggtgtctactgttgctacgaagttaggtgcaagaaatatgacgtttgttagtagtggtgtcttgttgctgacatacgtaagcgctatacttgcagctatcatttggccgcaagcctttaagtcaaatgtgatgttgttatctcatgccatcctggcgttctgcctaattttccaaactagagagctagcgcttgcaaattatgcttctgcacctagtaggcagttttttgaatttatctggaaattgcattatgcagagtacttagtttatgttttcatc

SEQ ID NO: 1119 - DNA, 969 bp, Artificial Sequence
  Synthetic
atgtcagccgggagcgaccagatagaaggaagtcctcatcacgagtctgataactccattgcgacaaaaatcctgaatttcggtcatacgtgctggaagttacaaaggccctatgtcgtgaaaggtatgatttcgatagcttgtggcttgtttggtcgcgaactatttcataataccaaccttttatcttggtcattgatgctcaaggcattctcatccttaatggtaatcctttcttttaatggatttgctgccataatgaatcaaatttacgatgttgaaattgaccgaattaacaaaccagatttgccactcgttagtggagagatgagtatcgaaactgcatggatactatcgatcattgtcgctctgacaggcttaatattgactattaagcttaattgtggtccgctatttatatcattgtattgcgtatctttattcgctggatttgcatacagcgttcctccaattcgttggaaacagtatcctttcaccaacttcttaataactatcagctcacacgtgggtgttaactttacatgttattacgcctccagagcagcctttggcttacccttcgaaatgtctccgccatttacttttattctcgcttttatgaccgtaatgggaatgacaatagctttcgcgaaagacatttcagatatcgaaggtgatgcgaaatatggggtgtctactgttgctacgaagttaggtgcaagaaatatgacgtttgttgtcagtggtgccttgttgctgaattacgtaagcgctatacttgcagctatcatttggccgcaagcctttaagtcaaatgtgatgttgttatctcatgccatcctggcgttctgcctaattttccaaactagagagctagcgcttgcaaattatgcttctgcacctagtaggcagttttttgaatttatctggaaattgcattatgcagagtacttagtttatgttttcatc

SEQ ID NO: 1120 - DNA, 969 bp, Artificial Sequence
  Synthetic
atgtcagccgggagcgaccagatagaaggaagtcctcatcacgagtctgataactccattgcgacaaaaatcctgaatttcggtcatacgtgctggaagttacaaaggccctatgtcgtgaaaggtatgatttcgatagcttgtggcttgtttggtcgcgaactatttcataataccaaccttttatcttggtcattgatgctcaaggcattctcatccttaatggtaatcctttcttttaatggttttgctgccataatgaatcaaatttacgatgttgaaattgaccgaattaacaaaccagatttgccactcgttagtggagagatgagtatcgaaactgcatggatactatcgatcattgtcgctctgacaggcttaatattgactattaagcttaattgtggtccgctatttatatcattgtattgcgtatctttgttcgctggatttgcatacagcgttcctccaattcgttggaaacagtatcctttcaccaacttcttaataactatcagctcacacgtgggtgttaactttacatgttattacgcctccagagcagcctttggcttacccttcgaaatgtctccgccatttacttttattctcgcttttatgaccgtaatgggaatgacaatagctttcgcgaaagacatttcagatatcgaaggtgatgcgaaatatggggtgtctactctggctacgaagttaggtgcaagaaatatgacgtttgttgtcagtggtgtcttgttgctgacatacgtaagcgctatacttgcagctatcatttggccgcaagcctttaagtcaaatgtgatgttgttatctcatgccatcctggcgttctgcctaattttccaaactagagagctagcgcttgcaaattatgcttctgcacctagtaggcagttttttgaatttatctggaaattgcattatgcagagtacttagtttatgttttcatc

SEQ ID NO: 1121 - DNA, 969 bp, Artificial Sequence
  Synthetic
atgtcagccgggagcgaccagatagaaggaagtcctcatcacgagtctgataactccattgcgacaaaaatcctgaatttcggtcatacgtgctggaagttacaaaggccctatgtcgtgaaaggtatgatttcgatagcttgtggcttgtttggtcgcgaactatttcataataccaaccttttatcttggtcattgatgctcaaggcattctcatccttaatggtaatcctttcttttaatggatttgctgccataatgaatcaaatttacgatgttgagattgaccgaattaacaaaccagatttgccactcgttagtggagagatgagtatcgaaactgcatggatactatcgatcattgtcgctctgacaggcttaatattgactattaagcttaattgtggtccgctatttatatcattgtattgcgtatctttattcgctggatttgcatacagcgttcctccaattcgttggaaacagtatcctttcaccaacttcttaataactatcagctcacacgtgggtgttaactttacatgttattacgcctccagagcagcctttggcttacccttcgaaatttctccgccatttacttttattctcgcttttatgaccgtaatgggaatgacaatagctttcgcgaaagacatttcagatatcgaaggtgatgcgaaatatggggtgtctactgttgctacgaagttaggtgcaagaaatatgacgtttgttgtcagtggtgtcttgttgctgacatacgtaagcgctatacttgcagctatcatttggccgcaagcctttaagtcaaatgtgatgttgttatctcatgccatcctggcgttctgcctaattttccaaactagagagctagcgcttgcaaattatgcttctgcacctagtaggcagttttttgaatttatctggaaattgcattatgcagagtacttagtttatgttttcatc

SEQ ID NO: 1122 - DNA, 969 bp, Artificial Sequence
  Synthetic
atgtcagccgggagcgaccagatagaaggaagtcctcatcacgagtctgataactccattgcgacaaaaatcctgaatttcggtcatacgtgctggaagttacaaaggccctatgtcgtgaaaggtatgatttcgatagcttgtggcttgtttggtcgcgaactatttcataataccaaccttttatcttggtcattgatgctcaaggcattctcatccttaatggtaatcctttcttttaatggatttgctgccataatgaatcaaatttacgatgttgaaattgaccgaattaacaaaccagatttgccactcgttagtggagagatgagtatcgaaactgcatggatactatcgatcattgtcgctctgacaggcttaatattgactattaagcttaattgtggtccgctatttatatcattgtattgcgtatctctcttcgctggatttgcatacagcgttcctccaattcgttggaaacagtatcctttcaccaacttcttaataactatcagctcacacgtgggtgttaactttacatgttattacgcctccagagcagcctttggcttacccttcgaaatgtctccgccatttacttttattctcgcttttatgaccgtaatgggaatgacaatagctttcgcgaaagacatttcagatatcgaaggtgatgcgaaatatgggatttctactgttgctacgaagttaggtgcaagaaatatgacgtttgttgtcagtggtgtcttgttgctgacatacgtaagcgctatacttgcagctatcatttggccgcaagcctttaagtcaaatgtgatgttgttatctcatgccatcctggcgttctgcctaattttccaaactagagagctagcgcttgcaaattatgcttctgcacctagtaggcagttttttgaatttatctggaaattgcattatgcagagtacttagtttatgttttcatc

SEQ ID NO: 1123 - DNA, 969 bp, Artificial Sequence
  Synthetic
atgtcagccgggagcgaccagatagaaggaagtcctcatcacgagtctgataactccattgcgacaaaaatcctgaatttcggtcatacgtgctggaagttacaaaggccctatgtcgtgaaaggtatgatttcgatagcttgtggcttgtttggtcgcgaactatttcataataccaaccttttatcttggtcattgatgctcaaggcattctcatccttaatggtaatcctttcttttaatggatttgctgccataatgaatcaaatttacgatgttgagattgaccgaattaacaaaccagatttgccactcgttagtggagagatgagtatcgaaactgcatggatactatcgatcattgtcgctctgacaggcttaatattgactattaagcttaattgtggtccgctatttatatcattgtattgcgtatctctattcgctggatttgcatacagcgttcctccaattcgttggaaacagtatcctttcaccaacttcttaataactatcagctcacacgtgggtgttaactttacatgttattacgcctccagagcagcctttggcttacccttcgaaatgtctccgccatttacttttattctcgcttttatgaccgtaatgggaatgacaatagctttcgcgaaagacatttcagatatcgaaggtgatgcgaaatatggggtgtctactttcgctacgaagttaggtgcaagaaatatgacgtttgttgtcagtggtgtcttgttgctgacatacgtaagcgctatacttgcagctatcatttggccgcaagcctttaagtcaaatgtgatgttgttatctcatgccatcctggcgttctgcctaattttccaaactagagagctagcgcttgcaaattatgcttctgcacctagtaggcagttttttgaatttatctggaaattgcattatgcagagtacttagtttatgttttcatc

SEQ ID NO: 1124 - DNA, 969 bp, Artificial Sequence
  Synthetic
atgtcagccgggagcgaccagatagaaggaagtcctcatcacgagtctgataactccattgcgacaaaaatcctgaatttcggtcatacgtgctggaagttacaaaggccctatgtcgtgaaaggtatgatttcgatagcttgtggcttgtttggtcgcgaactatttcataataccaaccttttatcttggtcattgatgctcaaggcattctcatccttaatggtaatcctttcttttaatggatttgctgccggtatgaatcaaatttacgatgttgaaattgaccgaattaacaaaccagatttgccactcgttagtggagagatgagtatcgaaactgcatggatactatcgatcattgtcgctctgacaggcttaatattgactattaagcttaattgtggtccgctatttatatcattgtattgcgtatctttattcgctggatttgcatacagcgttcctccaattcgttggaaacagtatcctttcaccaacttcttaataactatcagctcacacgtgggtgttaactttacatgttattacgcctccagagcagcctttggcttacccttcgaaatgtctccgccatttacttttattctcgcttttatgaccgtaatgggaatgacaatagctttcgcgaaagacatttcagatatcgaaggtgatgcgaaatatggggtgtctactgttgctacgaagttaggtgcaagaaatatgacgtttgttgtcagtggtgtcttgttgctgacatacgtaagcgctatacttgcagctatcatttggccgcaagcctttaagtcaaatgtgatgttgttatctcatgccatcctggcgttctgcctaattttccaaactagagagctagcgcttgcaaattatgcttctgcacctagtaggcagttttttgaatttatctggaaattgcattatgcagagtacttagtttatgttttcatc

SEQ ID NO: 1125 - DNA, 969 bp, Artificial Sequence
  Synthetic
atgtcagccgggagcgaccagatagaaggaagtcctcatcacgagtctgataactccattgcgacaaaaatcctgaatttcggtcatacgtgctggaagttacaaaggccctatgtcgtgaaaggtatgatttcgatagcttgtggcttgtttggtcgcgaactatttcataataccaaccttttatcttggtcattgatgctcaaggcattctcatccttaatggtaatcctttcttttaatggatttgctgccataatgaatcaaatttacgatgttgagattgaccgaattaacaaaccagatttgccactcgttagtggagagatgagtatcgaaactgcatggatactatcgatcattgtcgctctgacaggcttaatattgactattaagcttaattgtggtccgctatttatatcattgtattgcgtatctttattcgctggatttgcatacagcgttcctccaattcgttggaaacagtatcctttcaccaacttcttaataactatcagctcacacgtgggtgttaactttacatgttattacgcctccagagcagcctttggcttacccttcgaaatgtctccgccatttacttttattctcgcttttatgaccgtaatgggaatgacaatagctttcgcgaaagacatttcagatatcgaaggtgatgcgaaatatggggtgtctactgttgctacgaagttaggtgcaagaaatatgacgtttattgtcagtggtgtcttgttgctgacatacgtaagcgctatacttgcagctatcatttggccgcaagcctttaagtcaaatgtgatgttgttatctcatgccatcctggcgttctgcctaattttccaaactagagagctagcgcttgcaaattatgcttctgcacctagtaggcagttttttgaatttatctggaaattgcattatgcagagtacttagtttatgttttcatc

SEQ ID NO: 1126 - DNA, 969 bp, Artificial Sequence
  Synthetic
atgtcagccgggagcgaccagatagaaggaagtcctcatcacgagtctgataactccattgcgacaaaaatcctgaatttcggtcatacgtgctggaagttacaaaggccctatgtcgtgaaaggtatgatttcgatagcttgtggcttgtttggtcgcgaactatttcataataccaaccttttatcttggtcattgatgctcaaggcattctcatccttaatggtaatcctttcttttaatggatttgctgccataatgaatcaaatttacgatgttgaaattgaccgaattaacaaaccagatttgccactcgttagtggagagatgagtatcgaaactgcatggatactatcgatcattgtcgctctgacaggcttaatattgactattaagcttaattgtggtccgctatttatatcattgtattgcgtatctctgttcgctggatttgcatacagcgttcctccaattcgttggaaacagtatcctttcaccaacttcttaataactatcagctcacacgtgggtgttaactttacatgttattacgcctccagagcagcctttggcttacccttcgaaatgtctccgccatttacttttattctcgcttttatgaccgtaatgggaatgacaatagctttcgcgaaagacatttcagatatcgaaggtgatgcgaaatatggggtgtctactgttgctacgaagttaggtgcaagaaatatgacgtttgttgtcagtggtgtcttgttgctggcatacgtaagcgctatacttgcagctatcatttggccgcaagcctttaagtcaaatgtgatgttgttatctcatgccatcctggcgttctgcctaattttccaaactagagagctagcgcttgcaaattatgcttctgcacctagtaggcagttttttgaatttatctggaaattgcattatgcagagtacttagtttatgttttcatc

SEQ ID NO: 1127 - DNA, 969 bp, Artificial Sequence
  Synthetic
atgtcagccgggagcgaccagatagaaggaagtcctcatcacgagtctgataactccattgcgacaaaaatcctgaatttcggtcatacgtgctggaagttacaaaggccctatgtcgtgaaaggtatgatttcgatagcttgtggcttgtttggtcgcgaactatttcataataccaaccttttatcttggtcattgatgctcaaggcattctcatccttagttgtaatcctttcttttaatggatttgctgccataatgaatcaaatttacgatgttgagattgaccgaattaacaaaccagatttgccactcgttagtggagagatgagtatcgaaactgcatggatactatcgatcattgtcgctctgacaggcttaatattgactattaagcttaattgtggtccgctatttatatcattgtattgcgtatctctcttcgctggatttgcatacagcgttcctccaattcgttggaaacagtatcctttcaccaacttcttaataactatcagctcacacgtgggtgttaactttacatgttattacgcctccagagcagcctttggcttacccttcgaaatgtctccgccatttacttttattctcgcttttatgaccgtaatgggaatgacaatagctttcgcgaaagacatttcagatatcgaaggtgatgcgaaatatggggtgtctactgttgctacgaagttaggtgcaagaaatatgacgtttgttgtcagtggtgtcttgttgctgacatacgtaagcgctatacttgcagctatcatttggccgcaagcctttaagtcaaatgtgatgttgttatctcatgccatcctggcgttctgcctaattttccaaactagagagctagcgcttgcaaattatgcttctgcacctagtaggcagttttttgaatttatctggaaattgcattatgcagagtacttagtttatgttttcatc

SEQ ID NO: 1128 - DNA, 969 bp, Artificial Sequence
  Synthetic
atgtcagccgggagcgaccagatagaaggaagtcctcatcacgagtctgataactccattgcgacaaaaatcctgaatttcggtcatacgtgctggaagttacaaaggccctatgtcgtgaaaggtatgatttcgatagcttgtggcttgtttggtcgcgaactatttcataataccaaccttttatcttggtcattgatgctcaaggcattctcatccttaatggtaatcctttcttttaatggatttgctgccataatgaatcaaatttacgatgttgaaattgaccgaattaacaaaccagatttgccactcgttagtggagagatgagtatcgaaactgcatggatactatcgatcattgtcgctctgacaggcttaatattgactattaagcttaattgtggtccgctatttatatcattgtattgcgtatctttattcgctggatttgcatacagcgttcctccaattcgttggaaacagtatcctttcaccaacttcttaataactatcagctcacacgtgggtgttaactttacatgttattacgcctccagagcagcctttggcttacccttcgaaatgtctccgccatttacttttattctcgcttttatgaccgtaatgggaatggttatagctttcgcgaaagacatttcagatatcgaaggtgatgcgaaatatggggtgtctactgttgctacgaagttaggtgcaagaaatatgacgtttgttgtcagtggtgtcttgttgctgacatacgtaagcgctatacttgcagctatcatttggccgcaagcctttaagtcaaatgtgatgttgttatctcatgccatcctggcgttctgcctaattttccaaactagagagctagcgcttgcaaattatgcttctgcacctagtaggcagttttttgaatttatctggaaattgcattatgcagagtacttagtttatgttttcatc

SEQ ID NO: 1129 - DNA, 969 bp, Artificial Sequence
  Synthetic
atgtctgctggctctgaccaaattgaaggttccccgcatcacgaatcagataatagtattgccacaaagatcttaaactttgggcatacatgttggaaattccaaaggccctacgtcgtcaaaggattgataagcgcagcttgctcgctgttcggaaaggaattactacacaatacgaacctaatcagctggtcattaatgtttaaagctttcttcgcgttagtgccaatcctaagctttaactttttcgccgccgcaattaaccagatttatgatgttgagatcgacaggataaataagccagatcttccattggtatccggtgaattgtcaataagaactgcatggatattatctattatcgttgcgctgaccggactgatagtaacaatcaaaatgaaaggtggtcccctgtttatttccatatatatatttggtttgttccttggattcgcttactcagtgccacctatcaggtggaagcagtacccattcacgaattttctgatcacgttttctagccacgtcaccttacctttcacatcttactatgcaagtcgtgctgccttggggcttcctttcgagttacgtccatcatttagttttatcattgcctttatgaccgtaatgggaatgacgatcgcattcgcaaaggacatttctgacatagagggggataaaaaatacggtgtctccactctcgcgacaaaattaggagctaggaatatgactcgcgtggtgtccggtgtattattactaaattatgttgtagcaatattggctggcatcatatggccgtttgcttttaattccaacgttatgatatttagtcatgctattttggctttttgtctgatttttagaacgcgtgagttggcgcttgcaaactatgcctctgcgcccagcaggcagttttttgaattcatatggaatttgtactatgccgagtatttggtctacgtatttatt

SEQ ID NO: 1130 - DNA, 969 bp, Artificial Sequence
  Synthetic
atgtctgctggctctgaccaaattgaaggttccccgcatcacgaatcagataatagtattgccacaaagatcttaaactttgggcatacatgttggaaattacaaaggccctacgtcgtcaaaggactaataagcatcgcttgcggtctgttcggaaaggaattattgcacaatacgaacctaataagctggagtttaatgtttaaagctttcttcgcgttagtgccaatcctaagctttaacggtttcgccaatggcattaaccagatttatgatgttgagatcgacaggataaataagccagatcttccattggcatccggtgaaatgtcaatacgcactgcatggatattatctattatcgttgcgctgaccggactgatagtaacaatcaaaatgaaaggtggccccctgtttgtttcgctctatatatttggtcttttcttgggattcgcttactcagtgccacctatcaggtggaagcagtacccattcacgaattttctgatcattatctctagccacgtcgggttaaatttcacatcttactatgcatccagagcagccttggggcttcctttcgagttgcgtccaagttttagttttatcattgcctttatgaccgtaatgggaatgacgatcgcattcgcaaaggacatttctgacatagagggggataaaaaacatggtgtctccactctcgcgacaaaattaggagctaagaatatgactagagtggtgtccggttttttattactaaattatctgttggctatattggcaggcatcatatggccgtttgcttttaactccaacgttatgatactgagtcatgctattttggctttttgtctgatttttcgaacgcgtgagttggcgcttgcaaactatgcctctgcgcccagcaggcagttttttgaattcatatggaaattgtactatgccgagtatctcgtctacgtatttatt

SEQ ID NO: 1131 - DNA, 969 bp, Artificial Sequence
  Synthetic
atgtcagccgggagcgaccagatagaaggaagtcctcatcacgagtctgataactccattgcgacaaaaatcctgaatttcggtcatacgtgctggaagttacaaaggccctatgtcgtgaaaggtatgatttcgatagcttgtggcttgtttggtcgcgaactatttcataataccaaccttttatcttggtcattgatgctcaaggcattctcatccttaattgtaatcctttcttttaatggctttgctgccataatgaatcaaatttacgatgttgaaattgaccgaattaacaaaccagatttgccactcgttagtggagagatgagtatcgaaactgcatggatactatcgatcattgtcgctctgacaggcttaatattgactattaagcttaattgtggtccgctatttatatcattgtattgcgtatctttattcgctggatttgcatacagcgttcctccaattcgttggaaacagtatcctttcaccaacttcttaataactatcagctcacacgtgggtgttaactttacatgttattacgcctccagagcagcctttggcttacccttcgaaatgtctccgccatttacttttattctcgcttttatgaccgtaatgggaatgacaatagctttcgcgaaagacatttcagatatcgaaggtgatgcgaaatatggggtgtctactgttgctacgaagttaggtgcaagaaatatgacgtttgttgtcagtggtgtcttgttgctgacatacgtaagcgctatacttgcagctatcatttggccgcaagcctttaagtcaaatgtgatgttgttatctcatgccatcctggcgttctgcctaattttccaaactagagagctagcgcttgcaaattatgcttctgcacctagtaggcagttttttgaatttatctggaaattgcattatgcagagtacttagtttatgttttcatc

SEQ ID NO: 1132 - DNA, 969 bp, Artificial Sequence
  Synthetic
atgtcagccgggagcgaccagatagaaggaagtcctcatcacgagtctgataactccattgcgacaaaaatcctgaatttcggtcatacgtgctggaagttacaaaggccctatgtcgtgaaaggtatgatttcgatagcttgtggcttgtttggtcgcgaactatttcataataccaaccttttatcttggtcattgatgctcaaggcattctcatccttaatggtaatcctttcttttaatggatttgctgccataatgaatcaaatttacgatgttgaaattgaccgaattaacaaaccagatttgccactcgttagtggagagatgagtatcgaaactgcatggatactatcgatcattgtcgctctgacaggcttaatattgactattaagcttaattgtggtccgctatttatatcattgtattgcgtatctctcttcgctggatttgcatacagcgttcctccaattcgttggaaacagtatcctttcaccaacttcttaataactatcagctcacacgtgggtgttaactttacatgttattacgcctccagagcagcctttggcttacccttcgaaatgtctccgccatttacttttattctcgcttttatgaccgtaatgggaatgacaatagctttcgcgaaagacatttcagatatcgaaggtgatgcgaaatatggggtgtctactttggctacgaagttaggtgcaagaaatatgacgtttgttgtcagtggtgtcttgttgctgaattacgtaagcgctatacttgcagctatcatttggccgcaagcctttaagtcaaatgtgatgttgttatctcatgccatcctggcgttctgcctaattttccaaactagagagctagcgcttgcaaattatgcttctgcacctagtaggcagttttttgaatttatctggaaattgcattatgcagagtacttagtttatgttttcatc

SEQ ID NO: 1133 - DNA, 969 bp, Artificial Sequence
  Synthetic
atgtcagccgggagcgaccagatagaaggaagtcctcatcacgagtctgataactccattgcgacaaaaatcctgaatttcggtcatacgtgctggaagttacaaaggccctatgtcgtgaaaggtatgatttcgatagcttgtggcttgtttggtcgcgaactatttcataataccaaccttttatcttggtcattgatgctcaaggcattctcatccttaatggtaatcctttcttttaatggatttgctgccataatgaatcaaatttacgatgttgaaattgaccgaattaacaaaccagatttgccactcgttagtggagagatgagtatcgaaactgcatggatactatcgatcattgtcgctctgacaggcttaatattgactattaagcttaattgtggtccgctatttatatcattgtattgcgtatctttattcgctggatttgcatacagcgttcctccaattcgttggaaacagtatcctttcaccaacttcttaataactatcagctcacacgtgggtgttaactttacatgttattacgcctccagagcagcctttggcttacccttcgaaatgtctccgccatttacttttattctcgcttttatgaccgtaatgggaatgacaatagctttcgcgaaagacatttcagatatcgaaggtgatgcgaaatatggggtgtctactgttgctacgaagttaggtgcaagaaatatgacgtttgttgtcagtggtgtcttgttgctgtgttacgtaagcgctatacttgcagctatcatttggccgcaagcctttaagtcaaatgtgatgttgttatctcatgccatcctggcgttctgcctaattttccaaactagagagctagcgcttgcaaattatgcttctgcacctagtaggcagttttttgaatttatctggaaattgcattatgcagagtacttagtttatgttttcatc

SEQ ID NO: 1134 - DNA, 969 bp, Artificial Sequence
  Synthetic
atgtcagccgggagcgaccagatagaaggaagtcctcatcacgagtctgataactccattgcgacaaaaatcctgaatttcggtcatacgtgctggaagttacaaaggccctatgtcgtgaaaggtatgatttcgatagcttgtggcttgtttggtcgcgaactatttcataataccaaccttttatcttggtcattgatgctcaaggcattctcatccttaatggtaatcctttcttttaatggatttgctgccataatgaatcaaatttacgatgttgagattgaccgaattaacaaaccagatttgccactcgttagtggagagatgagtatcgaaactgcatggatactatcgatcattgtcgctctgacaggcttaatattgactattaagcttaattgtggtccgctatttatatcattgtattgcgtatctctgttcgctggatttgcatacagcgttcctccaattcgttggaaacagtatcctttcaccaacttcttaataactatcagctcacacgtgggtgttaactttacatgttattacgcctccagagcagccgtgggcttacccttcgaaatgtctccgccatttacttttattctcgcttttatgaccgtaatgggaatgacaatagctttcgcgaaagacatttcagatatcgaaggtgatgcgaaatatggggtgtctactgttgctacgaagttaggtgcaagaaatatgacgtttgttgtcagtggtgtcttgttgctgacatacgtaagcgctatacttgcagctatcatttggccgcaagcctttaagtcaaatgtgatgttgttatctcatgccatcctggcgttctgcctaattttccaaactagagagctagcgcttgcaaattatgcttctgcacctagtaggcagttttttgaatttatctggaaattgcattatgcagagtacttagtttatgttttcatc

SEQ ID NO: 1135 - DNA, 969 bp, Artificial Sequence
  Synthetic
atgtcagccgggagcgaccagatagaaggaagtcctcatcacgagtctgataactccattgcgacaaaaatcctgaatttcggtcatacgtgctggaagttacaaaggccctatgtcgtgaaaggtatgatttcgatagcttgtggcttgtttggtcgcgaactatttcataataccaaccttttatcttggtcattgatgctcaaggcattctcatccttaatggtaatcctttcttttaatggatttgctgccataatgaatcaaatttacgatgttgagattgaccgaattaacaaaccagatttgccactcgttagtggagagatgagtatcgaaactgcatggatactatcgatcattgtcgctctgacaggcttaatattgactattaagcttaattgtggtccgctatttatatcattgtattgcgtatctttattcgctggatttgcatacagcgttcctccaattcgttggaaacagtatcctttcaccaacttcttaataactatcagctcacacgtgttagttaactttacatgttattacgcctccagagcagcctttggcttacccttcgaaatgtctccgccatttacttttattctcgcttttatgaccgtaatgggaatgacaatagctttcgcgaaagacatttcagatatcgaaggtgatgcgaaatatggggtgtctactgttgctacgaagttaggtgcaagaaatatgacgtttgttgtcagtggtgtcttgttgctgaattacgtaagcgctatacttgcagctatcatttggccgcaagcctttaagtcaaatgtgatgttgttatctcatgccatcctggcgttctgcctaattttccaaactagagagctagcgcttgcaaattatgcttctgcacctagtaggcagttttttgaatttatctggaaattgcattatgcagagtacttagtttatgttttcatc

SEQ ID NO: 1136 - DNA, 969 bp, Artificial Sequence
  Synthetic
atgtcagccgggagcgaccagatagaaggaagtcctcatcacgagtctgataactccattgcgacaaaaatcctgaatttcggtcatacgtgctggaagttacaaaggccctatgtcgtgaaaggtatgatttcgatagcttgtggcttgtttggtcgcgaactatttcataataccaaccttttatcttggtcattgatgctcaaggcattctcatccttaatggtaatcctttcttttaatggatttgctgccataatgaatcaaatttacgatgttgagattgaccgaattaacaaaccagatttgccactcgttagtggagagatgagtatcgaaactgcatggatactatcgatcattgtcgctctgacaggcttaatattgactattaagcttaattgtggtccgctatttatatcattgtattgcgtatctttattcgctggatttgcatacagcgttcctccaattcgttggaaacagtatcctttcaccaacttcttaataactatcagctcacacgtgggtgttaactttacatgttattacgcctccagagcagcctttggcttacccttcgaaatgtctccgccatttacttttattctcgcttttatgaccgtaatgggaattacaatagctttcgcgaaagacatttcagatatcgaaggtgatgcgaaatatggggtgtctactgttgctacgaagttaggtgcaagaaatatgacgtttgttgtcagtggtgtcttgttgctgacatacgtaagcgctatacttgcagctatcatttggccgcaagcctttaagtcaaatgtgatgttgttatctcatgccatcctggcgttctgcctaattttccaaactagagagctagcgcttgcaaattatgcttctgcacctagtaggcagttttttgaatttatctggaaattgcattatgcagagtacttagtttatgttttcatc

SEQ ID NO: 1137 - DNA, 969 bp, Artificial Sequence
  Synthetic
atgtctgctggctctgaccaaattgaaggttccccgcatcacgaatcagataatagtattgccacaaagatcttaaactttgggcatgcgtgttggaaattacaaaggccctacaccgtcaaaggacttataagcatcgcttgcggtctgttcggaaaggaattactacacaatactaacctaattagctggtcgttaatgttcaaagctttcttcgcgttagtgccaatcctaagctttaacggtttcgccaatatcataaaccagatttatgatgttgagatcgacaggataaataagccagatcttccattggtatccggtgaaatgtcaataagaactgcatggatattatctattatcgttgcgctgaccggactgataattacaatcaaaatgaaaggcggtcccctgtttttttttttgtatatatttggtttgttcctcggattcgcttactcagtgccacctatcaggtggaagcagtacccattcacgaattttctgatcattatctctagccacgtcgggttagcgttcacatcttactatgcatcccgcgcagccttggggcttcctttcgagttgcgtccaagttttagttttatcattgcctttatgaccgtaatgactatgacgatcgcattcgcaaaggacatttctgacatagagggggataaaaaatacggtgtctccactttggcgacaaaattaggagctaggaatactactcggatttgttccggtttattattactaaattatctggtatctatattggctggcatcatatggccgtttgcttttaattccaacgttatgatactgagtcatgctattttggctttttgtctgatttttagaacgcgtgagttggcgcttgcaaactatgcctctgcgcccagcaggcagttttttgaattcatatggaagttgtactatgccgagtatcttgtctacgtatttatt

SEQ ID NO: 1138 - DNA, 969 bp, Artificial Sequence
  Synthetic
atgtctgctggctctgaccaaattgaaggttccccgcatcacgaatcagataatagtattgccacaaagatcttaaactttgggcatacatgttggaaattcactaggccctacgtcgtcaaaggactaataagcatcgcttgctcgctgttcggaaaggaattattgcacaatacgaacctaataagctggtcattaatgtttaaagctttcttcgcgttagtgccaatcctaagctttaactttttcgccgccgcaatgaaccagatttatgatgttgagatcgacaggataaataagccatatcttccattggtatccggtgaaatgtcaatacgaactgcatggatattatctattatcgttgcgctgaccggactgatagtaacaatcaaaatgaaaggtggtcccctgcttgtttttatatatatatttggtctcttcttgggattcgcttactcagtgccacctatcaggtggaagcagtacccattcacgaattttctgatcacgatctctagccacgtcgggttagcgttcacagtatactatgcaagtcgtgcagccttggggcttcctttcgagctacgtccatcatttagttttatcattgcctttatgaccgtaatgggaatggttatcgcattcgcaaaggacatttctgacatagagggggatagaaaatacggtgtctccactttggcggttaaattaggagctaggaatatgactcgggtgggttccggtctattattactaaattatgttggctctatattggctggcatcatatggccgtttgcttttaactccaacgtgatgatactgagtcatgctattttggcttcgtgtctgatttttcgcacgcgtgagttggcgcttgcaaactatgcctctgcgcccagcaggcagttttttgaattcatatggaatttgtactatgccgagtatctcgtctacgtatttatt

SEQ ID NO: 1139 - DNA, 969 bp, Artificial Sequence
  Synthetic
atgtctgctggctctgaccaaattgaaggttccccgcatcacgaatcagataatagtattgccacaaagatcttaaactttgggcatgcattctggaaattacaaaggccctacgtcgtcaaaggagtaataagcggtgcttgcgcgctgttcggaaaggaattacttcacaatacgaacctaataagctggtcgttaatgtttaaagctttcttcgcgttagtgccaatcctaagctttaactttttcgccgccggtgttaaccagatttatgatgttgagatcgacaggataaataagccagatcttccaattgtatccggtgaaatgtcaatacgtactgcatggatattatctattatcgttgcgctgaccggactgatagtaacaatcaaaatgaaaggcggtcccctgttggttattatatatatactcggtattttcgctggattcgcttactcagtgccacctatcaggtggaagcagtacccattcacgaattttgctatcattatcttgagccacgtcgggttagcgttcacagtttactatgcatcgcgagcagccttggggcttcctttcgagttgcgtccatcatttagttttatcattgcctttatgaccgtatttggaatggcaatcgcattcgcaaaggacatttctgacatagagggggatgcaaaatacggtgtctccactttggcgacaaaattaggagctaggaatatgacttgggtggtgtccggtttgttattactaaattatctggtagctatacttgctggcatcatatggccgtttgcttttaattccaacgttatgatactgagtcatgctattttggctttttgtctgatttttagaacgcgtgagttggcgcttgcaaactatgcctctgcgcccagcaggcagttttttgaattcatatggttattgtactatgccgagtatcttgtctacgtatttatt

SEQ ID NO: 1140 - DNA, 969 bp, Artificial Sequence
  Synthetic
atgtctgctggctctgaccaaattgaaggttccccgcatcacgaatcagataatagtattgccacaaagatcttaaactttgggcatgcattctggaaattacaaaggccctacgtcgtcaaaggattgataatcatcgcttgcggtctgttcggaaaggaattacttcacaataccaacctaattagctggtctttaatgtttaaagctttcttcggtttaataccaatcctaagctttaactttttcgccgccgcgttgaaccagatttatgatgttgagatcgacaggataaataagccagatcttccattggtatccggtgaactctcaatacgtactgcatggatattatctattatcgttgcgctgaccggactgatagtaacaatcaaaatgaaaggcggtcccctgtttgtttttttgtatatatttggtttgttcgctggattcgcttactcagtgccacctatcaggtggaagcagtacccattcacgaattttctgatcacgatctctagccacgtcgttttagcgttcacatcttactatgcatcgcgcgcagccttggggcttcctttcgagttacgtccaagttttagttttatcattgcctttatgaccgtaatgggattgacgatcgcattcgcaaaggacatttctgacatagagggggatgcagcttacggtgtctccactctagcgacaaaattaggagctaggactatgactagagtgtgttccggtttattattactaaattatctgcttgctatattggctggcatcatatggccgtttgcctttaattccaacgttatgatactgagtcatgctattttggctttttgtctgatttttagaacgcgtgagttggcgcttgcaaactatgcctctgcgcccagcaggcagttttttgaattcatatggttattgtactatgccgagtatctagtctacgtatttatt

SEQ ID NO: 1141 - DNA, 969 bp, Artificial Sequence
  Synthetic
atgtctgctggctctgaccaaattgaaggttccccgcatcacgaatcagataatagtattgccacaaagatcttaaactttgggcatgcgtgttggaaattacaaaggccctacgtcgtcaaaggattgataagcatcgcttgcggtctgttcgcaaaggaattactacacaatactaacctaataagctggtcattaatgtttaaagctttcttcgcgttagtgccaatcctaagctttaactttttcgccgccgcaatgaaccagatttatgatgttgagatcgacaggataaataagccagatcttccattggtatccggtgaaatgtcaatacgtactgcatggatattatctatttcggttgcgctgaccggactgatactcacaatcaaaatgaaaggcggtcccctgtttgttagtatatatatatttggtttgttcgctggattcgcttactcagtgccacctatcaggtggaagcagtacccattcacgaattttctgatcattatctctagccacgtcgggttagcgttcacagtatactatgcatccagagctgccttggggcttcctttcgagttgcgtccaagttttagttttatcattgcctttatgaccgtaatggctatgacgatcgcattcgcaaaggacatttctgacatagagggggatcgaaaatacggtgtctccacttttgcgacaaaattaggagctaggaatatgactagagtgtgttccggtctgttattactaaattatctgggcgccatattggctggcatcatatggccgtttgcatttaacaagaacgtaatgatactgagtcatgctattttggctttttggctgatttttagaacgcgtgagttggcgcttgcaaactatgcctctgcgcccagcaggcagttttttgaattcatatggaatttgtactatgccgagtatctagtctacgtatttatt

SEQ ID NO: 1142 - DNA, 969 bp, Artificial Sequence
  Synthetic
atgtctgctggctctgaccaaattgaaggttccccgcatcacgaatcagataatagtattgccacaaagatcttaaactttgggcatacatgttggaaattacaaaggccctacgtcgtcaaaggactaataagcatcgcttgcggtctgttcggaaaggaattattgcacaatacgaacctaataagctggtcattaatgtttaaagctttcttcgcgttagtgccaatcctaagctttaacggtttcgccaatgggattaaccagatttatgatgttgagatcgacaggataaataagccagatcttccattggtatccggtgaaatgtcaatacgcactgcatggatattatctattatcgttgcgctgaccggactgatagtaacaatcaaaatgaaaggcggtcccctgtttgttatcatatatatatttggtttgttcgctggattcgcttactcagtgccacctatcaggtggaagcagtacccattcacgaattttctgatcattatctctagccacgtcactttagcgttcacagtttactatgcaagtagagcagccttggggcttcctttcgagttgtcgccatcttttagttttatcattgcctttatgaccgtaatgggactcgctatcgcattcgcaaaggacatttctgacatagagggggataaaaaatacggtgtctccactttggcgacaaaattaggagctaggaattcgactagagtggtgtccggtttgttattactaaattatctggtatctatacttgccggcatcatatggccgtttgcttttaactccaacgttatgatacccagtcatgctattttggcttcatgtctgatttttagaacgcgtgagttggcgcttgcaaactatgcctctgcgcccagcaggcagttttttgaattcatatggaagttgtactatgccgagtatctcgtctacgtatttatt

SEQ ID NO: 1143 - DNA, 969 bp, Artificial Sequence
  Synthetic
atgtctgctggctctgaccaaattgaaggttccccgcatcacgaatcagataatagtattgccacaaagatcttaaactttgggcatacatgttggaaattacaaaggccctacgtcgtcaaaggactgataagcggtgcttgcggtctgttcggaaaggaattattgcataataccaacctaatcagctggagtttaatgtttaaagctttcttcgcgttagtgccaatcctaagctttaacggcttcgccgccatcataaaccagatttatgatgttgagatcgacaggataaataagccagatcttccattggcatccggtgaactctcaatacgcactgcatggatattatctattatcgttgcgctgaccggactgatattgacaatcaaaatgaaagggggtcccctgtttgtttttatatatatatttggtttgttcattggattcgcttactcagtgccacctatcaggtggaagcagtacccattcacgaattttctgatcattatctctagccacgtcgggttaaatttcacatcttactatgcatcgcgtgcagccttggggcttcctttcgagttgcgtccaagttttagttttatcattgcctttatgaccgtaatgggactaacgatcgcattcgcaaaggacatttctgacatagagggggatgcaaaatttggtgtctccactcttgcgacaaaattaggagctaaaaatatgactagaatttgttccggtctattattactaaattatctggtagctatattggctggcatcatatggccgtttgcttttaattccaacgttatgatactgagtcatgctattttggctttttgtctgatttttagaacgcgtgagttggcgcttgcaaactatgcctctgcgcccagcaggcagttttttgaattcatatggaagttgtactatgccgagtatctcgtctacgtatttatt

SEQ ID NO: 1144 - DNA, 969 bp, Artificial Sequence
  Synthetic
atgtctgctggctctgaccaaattgaaggttccccgcatcacgaatcagataatagtattgccacaaagatcttaaactttgggcatgcatgttggaaattacaaaggccctacgtcgtcaaaggactgataagcatcgcttgctccctgttcggaaaggaattactacataataccaacctaattagctggtcattaatgtttaaagctttcttcgcgttagtgccaatcctaagctttaactttttcgccgccgcaataaaccagatttatgatgttgagatcgacaggataaataagccatatcttccattggcgtccggtgaaatgtcaatacgtactgcatggatattatctatttcggttgcgctgaccggactgatactcacaatcaaaatgaaaggtggccccctgtttttgtttatatatatatttggtcttttcgctggattcgcttactcagtgccacctatcaggtggaagcagtacccattcacgaattttctgatcacgatctctagccacgtcgggttaaatttcacatcttactatgcatcccgcgctgccttggggcttcctttcgagttgagtccaagttttagttttatcattgcctttatgaccgtaatgggaatggtaatcgcattcgcaaaggacatttctgacatagagggggataaaaaatacggtgtctccactgtggcgacaaaattaggagctaggaatactactagactatgttccggtcttttattactaaattatctggtatctatactagcaggcatcatatggccgtttgcctttaactccaacgttatgatactgagtcatgctattttggctttttgtctgatttttcggacgcgtgagttggcgcttgcaaactatgcctctgcgcccagcaggcagttttttgaattcatatggaatttgtactatgccgagtatttggtctacgtatttatt

SEQ ID NO: 1145 - DNA, 969 bp, Artificial Sequence
  Synthetic
atgtctgctggctctgaccaaattgaaggttccccgcatcacgaatcagataatagtattgccacaaagatcttaaactttgggcatacattctggaaattacaaaggccctacgtcgtcaaaggactgataagcatcgcttgcggtctgttcggaaaggaattacttcataatactaacctaattagctggtcattaatgtttaaagctttcttcgcgttagtgccaatcctaagctttaactttttcgccgccgcaataaaccagatttatgatgttgagatcgacaggataaataagccagatcttccattggcatccggtgaaatgtcaatacgcactgcatggatattatctatttcggttgcgctgaccggactgataattacaatcaaaatgaaagggggccccctgttggtttgtatatatatatttggtctcttcgctggattcgcttactcagtgccacctatcaggtggaagcagtacccattcacgaattttctgatcattatcattagccacgtcgggttacctttcacatcttactatgcatcgcgtgccgccttggggcttcctttcgagttgcgtccaagttttagttttatcattgcctttatgaccgtaatgggaattacgatcgcattcgcaaaggacatttctgacatagagggggataaaaaatacggtgtctccactttggcgacaaaattaggagctaagaatatgactagaatttgttccggtgtattattactaaattatctggtatctatactcgctggcatcatatggccgtttgcttttaactccaacgttatgatactgagtcatgctattttggctttttttctgatttttcgaacgcgtgagttggcgcttgcaaactatgcctctgcgcccagcaggcagttttttgaattcatatggttattgtactatgccgagtatctcgtctacgtatttatt

SEQ ID NO: 1146 - DNA, 969 bp, Artificial Sequence
  Synthetic
atgtctgctggctctgaccaaattgaaggttccccgcatcacgaatcagataatagtattgccacaaagatcttaaactttgggcatacatgttggaaattacaaaggccctacgtcgtcaaaggattgatacttatcgcttgcggtctgttcggaaaggaattactacataatacgaatctaattagctggtcgttaatgtttaaagctttcttcgcgttagtgccaatcctaagctttaactttttcgccgccgcaatgaaccagatttatgatgttgagatcgacaggataaataagccagatcttccattggcatccggtgaaatgtcaatacggactgcatggatattatctattatcgttgcgctgaccggactgatagtaacaatcaaaatgaaaggcggtcccctggctgtttttatatatatatttggtttgttgttgggattcgcttactcagtgccacctatcaggtggaagcagtacccattcacgaattttctgatcattatctctagccacgtcgggttagcgttcacatcttactatgcatcgcgcgccgccttggggcttcctttcgagctccgtccaagttttagttttatcattgcctttatgaccgtaatgggaatggttatcgcattcgcaaaggacatttctgacgtggagggggatgcaaaatacggtgtctccactttggcggtaaaattaggagttaagaatactactagattgtgttccggtgtattattactaaattatctgggttctatattggctggcatcatatggccgtttgcttttaactccaacgtaatgatactgagtcatgctattttggctttttgtctgatttttcgaacgcgtgagttggcgcttgcaaactatgcctctgcgcccagcaggcagttttttgaattcatatggaatttgtactatgccgagtatttagtctacgtatttatt

SEQ ID NO: 1147 - DNA, 969 bp, Artificial Sequence
  Synthetic
atgtctgctggctctgaccaaattgaaggttccccgcatcacgaatcagataatagtattgccacaaagatcttaaactttgggcatgcgttctggaaattacaaaggccctacgtcgtcaaaggactaataagcatcgcttgcggtctgttcggaaaggaattattgcacaatacgaacctaattagctggtcgttaatgtttaaagctttcttcgcgttagtgccaatcctaagctttaactttttcgccgccgtagtaaaccagatttatgatgttgagatcgacaggataaataagccagatcttccattggtatccggtgaaatgtcaatagaaactgcatggatattatctattatcgttgcgctgaccggactgatagtaacaatcaaaatgaaaggtggtcccctgcttgtttccatatatatattgggtttgttggctggattcgcttactcagtgccacctatcaggtggaagcagtacccattcacgaattttctgatcattatctctagccacgtcattttagcgttcgtttcttactatgcaagtagagcagccttggggcttcctttcgagctctccccatcatttagttttatcattgcctttgttaccgtaatgtcgatgacgatcgcattcgcaaaggacatttctgacatagagggggatgcaaaatacggtgtctccactttggcgacaaaattaggagctaggaatatgactcgtctatgttccggtctgttattactaaattatctggtatctatattggctggcatcatatggccgcaagcttttaattccaacgtgatgataggcagtcatgctattttggctttttcactgatttttcagacgcgtgagttggcgcttgcaaactatgcctctgcgcccagcaggcagttttttgaattcatatggaatttgtactatgccgagtatctcgtctacgtatttatt

SEQ ID NO: 1148 - DNA, 969 bp, Artificial Sequence
  Synthetic
atgtctgctggctctgaccaaattgaaggttccccgcatcacgaatcagataatagtattgccacaaagatcttaaactttgggcatgcattctggaaattaactaggccctacgtcgtcaaaggattgatactttgtgcttgcggtctgttcggaaaggaattattgcacaatacgaacctaataagctggtcgttaatgtttaaagctttcttcgcgttaattccaatcctaagctttaactttttcgccgccgcaatgaaccagatttatgatgttgagatcgacaggataaataagccagatcttccattggcatccggtgaaatgtcaataagaactgcatggatattatctattatcgttgcgctgaccggactgataattacaatcaaaatgaaaggcggtcccctgattgtttttatatatatatttggtttgttcttgggagctgcttactcagtgccacctatcaggtggaagcagtacccattcacgaattttctgatcacgttttctagccacgtcgggttagcgttcacatcttactatgcaagtagagctgccttggggcttcctttcgagctccgtccatcatttagttttatcattgcctttatgaccgtaatgggaatggctatcgcattcgcaaaggacatttctgacatagagggggatgcaaaatacggtgtctccactctagcgacaaaattaggagctaggaatatgactcgcattgtgtccggtttgttattactaaattatctggtagccatactcgctggcatcatatggccgtttgcatttaattccaacgttatgatactgagtcatgctattttggctttttgtctgatttttcgaacgcgtgagttggcgcttgcaaactatgcctctgcgcccagcaggcagttttttgaattcatatggttattgtactatgccgagtatttagtctacgtatttatt

SEQ ID NO: 1149 - DNA, 969 bp, Artificial Sequence
  Synthetic
atgtctgctggctctgaccaaattgaaggttccccgcatcacgaatcagataatagtattgccacaaagatcttaaactttgggcatacatgttggaaattccaaaggccctacgtcgtcaaaggattgatacttatcgcttgcggtctgttcggaaaggaattactacataataccaacctaataagctggtcgttaatgtttaaagctttcttcgcgttagtgccaatcctaagctttaacggtttcgccgccggcatgaaccagatttatgatgttgagatcgacaggataaataagccagatcttccattggtatccggtgaaatgtcaataagaactgcatggatattatctattatcgttgcgctgaccggactgatagtaacaatcaaaatgaaaggtggccccctgctcacttttatatatatatttggtttgttcgctggattcgcttactcagtgccacctatcaggtggaagcagtacccattcacgaattttctgatcacgatctctagccacgtcactttaaatttcacattttactatgcaagtagagcagccttggggcttcctttcgagctacgtccatcctttagttttatcattgcctttatgaccgtaatgggaattacgatcgcattcgcaaaggacatttctgacatagagggggataaaaaatacggtgtctccactgtggcgacaaaattaggagctaggaatacaactagattgtgttccggtttgttattactaaattatctggtagcaatacttgctggcatcatatggccgtttgcttttaattccaacgttatgatatttagtcatgctattttggctttttgtctgatttttcgcacgcgtgagttggcgcttgcaaactatgcctctgcgcccagcaggcagttttttgaattcatatggaagttgtactatgccgagtatttggtctacgtatttatt

SEQ ID NO: 1150 - DNA, 969 bp, Artificial Sequence
  Synthetic
atgtctgctggctctgaccaaattgaaggttccccgcatcacgaatcagataatagtattgccacaaagatcttaaactttgggcatacattctggaaattacaaaggccctacacggtcaaaggagtgataagcggtgcttgcggtctgttcggaaaggaattattgcacaatactaacctaataagctggtcgttaatgtttaaagctttcttcgcgttagtgccaatcctaagctttaacgcattcgccaatatcgtaaaccagatttatgatgttgagatcgacaggataaataagccagatcttccattggtatccggtgaaatgtcaatacgtactgcatggatattatctattatcgttgcgctgaccggactgatacttacaatcaaaatgaaaggtggccccctgctcgtttttatatatatattgggtattttcttgggattcgcttactcagtgccacctatcaggtggaagcagtacccattcacgaattttctgatcacgctttctagccacgtcattttagcgttcacatcttactatgcaagtcgcgccgccttggggcttcctttcgagttgcgtccaagttttagttttatcattgcctttatgaccgtatttggaatgacgatcgcattcgcaaaggacatttctgacatagagggggataaaaaatacggtgtctccactgtggcgacaaaattaggagctaggaatatgacttggctatgttccggtgtattattactaaattatctgggggctatactagctggcatcatatggccgtttgcatttaactccaacgttatgatactgagtcatgctattttggctttttggctgatttttagaacgcgtgagttggcgcttgcaaactatgcctctgcgcccagcaggcagttttttgaattcatatggttattgtactatgccgagtatcttgtctacgtatttatt

SEQ ID NO: 1151 - DNA, 969 bp, Artificial Sequence
  Synthetic
atgtctgctggctctgaccaaattgaaggttccccgcatcacgaatcagataatagtattgccacaaagatcttaaactttgggcatgcattctggaaattacaaaggccctacaccgtcaaaggagttatacttggtgcttgctgtctgttcggaaaggaattactacacaatacgaacctaataagctggtcgttaatgtttaaagctttcgcggcgttagtgccaatcctactctttaactttttcgccgccatcgttaaccagatttatgatgttgagatcgacaggataaataagccagatcttccattggtatccggtgaaatgtcaataagaactgcatggatattatctattagtgttgcgctgaccggactgttggtaacaatcaaaatgaaaggcggtcccctgtttgtttttatatatatattgggtattttcgctggattcgcttactcagtgccacctatcaggtggaagcagtacccattcacgaattttctgatcacgatctctagccacgtcgggttagcgttcacagtgtactatgcatcgcgtgcagccttggggcttcctttcgagttgcgtccatcatttagttttatcattgcctttatgaccgtaatgggaatgacgatcgcattcgcaaaggacatttctgacatagagggggataaaaaatttggtgtctccactttggcgacaaaattaggagctaggaatatgacttgggtgtgttccggtctattattactaaattatctggtatctatattggctggcatcatatggccgtttgcttttaactccaacgttatgatactgagtcatgctattttggctagttgtctgatttttagaacgcgtgagttggcgcttgcaaactatgcctctgcgcccagcaggcagttttttgaattcatatggttattgtactatgccgagtatctcgtctacgtatttatt

SEQ ID NO: 1152 - DNA, 969 bp, Artificial Sequence
  Synthetic
atgtctgctggctctgaccaaattgaaggttccccgcatcacgaatcagataatagtattgccacaaagatcttaaactttgggcatacatgttggaaattagcgaggccctacgtcgtcaaaggactgataagcatcgcttgcggtctgttcggaaaggaattacttcataataccaacctaattagctggtcattaatgtttaaagctttcttcgcgttaataccaatcctaagctttaactttttcgccgccgcaattaaccagatttatgatgttgagatcgacaggataaataagccagatcttccaatagtatccggtgaaatgtcaatacgtactgcatggataatttctattatcgttgcgctgaccggactgatagtaacaatcaaaatgaaaggcggtcccctgttgttgtttctctatatatttggtttgttcgctggagcagcttactcagtgccacctatcaggtggaagcagtacccattcacgaattttctgatcacgatctctagccacgtcgggttagcgttcacatcttactatgcaagtcgcgctgccttggggcttcctttcgagctacgtccatcttttagttttatcattgcctttatgaccgtaatgggaatggttatcgcattcgcaaaggacatttctgacatagagggggatgcaaaatacggtgtctccactatggcgacaaaattaggagctaggaatattactagagtggtgtccggtgtattattactaaattatgttggtgcaatattagctggcatcttttggccgtttgcttttaattccaacgttatgatactgagtcatgctattttggctttttgtctgatttttagaacgcgtgagttggcgcttgcaaactatgcctctgcgcccagcaggcagttttttgaattcatatggaatttgtactatgccgagtatctagtctacgtatttatt

SEQ ID NO: 1153 - DNA, 969 bp, Artificial Sequence
  Synthetic
atgtctgctggctctgaccaaattgaaggttccccgcatcacgaatcagataatagtattgccacaaagatcttaaactttgggcatacattctggaaatttagcaggccctacacggtcaaaggacttataagcatctcatgcggtctgttcggaaaggaattactccacaataccaacctaataagctggagtttaatgtttaaagctttcgtagcgttagtgccaatcctaagctttaactttttcgccaatgttgtaaaccagatttatgatgttgagatcgacaggataaataagccagatcttccattggtatccggtgaaatgtcaatagaaactgcatggatattatctattatcgttgcgctgaccggactgatattgacaatcaaaatgaaaggtggccccctgtttgtttctatatatatattgggtttgttcgctggattcgtgtactcagtgccacctatcaggtggaagcagtacccattcacgaattttctgatcattatctctagccacgtcgggttagcgttcacagtttactatgcatctagagcagccttggggcttcctttcgagttgcgtccatcctttagttttatcattgcctttgttaccgtaatgagtatggtcatcgcattcgcaaaggacatttctgacatagagggggataaaaaatacggtgtctccactgtggcgacaaaattaggagctaggaatatgactcgcgtggtgtccggtctcttattactaaattatctggtatctatactagctggcatcatatggccgcaagcttttaattccaacgttatgatactgagtcatgctattttggctttttgtctgatttttcagacgcgtgagttggcgcttgcaaactatgcctctgcgcccagcaggcagttttttgaattcatatggaatttgtactatgccgagtatctcgtctacgtatttatt

SEQ ID NO: 1154 - DNA, 969 bp, Artificial Sequence
  Synthetic
atgtctgctggctctgaccaaattgaaggttccccgcatcacgaatcagataatagtattgccacaaagatcttaaactttgggcatgcattctggaaattacaaaggccctacgtcgtcaaaggattgataagcatcgcttgcggtctgttcggaaaggaattacttcacaatactaacctaataagctggtcgttaatgtttaaagctttcttcgcgttagtgccaatcctaagctttaactttttcgccgccgcaatgaaccagatttatgatgttgagatcgacaggataaataagccagatcttccattggtatccggtgaaatttcaatacgtactgcatggataatctctattagtgttgcgctgaccggactgataattacaatcaaaatgaaaggcggtcccctgtttgtttttatatatatatttggtctcttcgctggagcggcttactcagtgccacctatcaggtggaagcagtacccattcacgaattttctgatcacgatctctagccacgtcgggttagcgttcacatcttactatgcatcgagagccgccttggggcttcctttcgagttgcgtccaagttttagttttatcattgcctttatgaccgtaatgggaattggtatcgcattcgcaaaggacatttctgacgttgagggggatgcaaaatacggtgtctccactttggcgacaaaattaggagtaaaaactatgactcgactagtgtccggtgtattattactaaattatctggtagctatattagctggcatcatatggccgtttgcttttaactccaacgttatgatactgagtcatgctattgctgctttttgtctgatttttcgcacgcgtgagttggcgcttgcaaactatgcctctgcgcccagcaggcagttttttgaattcatatggttattgtactatgccgagtatttggtctacgtatttatt

SEQ ID NO: 1155 - DNA, 969 bp, Artificial Sequence
  Synthetic
atgtctgctggctctgaccaaattgaaggttccccgcatcacgaatcagataatagtattgccacaaagatcttaaactttgggcatgcgttctggaaattacaaaggccctacactgtcaaaggactaataagcatcgcttgcggtctgttcggaaaggaattactccataatacgaacctaattagctggtcgttaatgtttaaagctttcttcgcgttagtgccaatcctatgttttaactttttcgccgccgtagttaaccagatttatgatgttgagatcgacaggataaataagccagatcttccattggcatccggtgaaatgtcaatagaaactgcatggatattatctattatcgttgcgctgaccggactgatagtaacaatcaaaatgaaaggcggtcccctgtttgtttcgatatatatattgggtttgttcttgggattcgcttactcagtgccacctatcaggtggaagcagtacccattcacgaattttctgatcattatctctgtccacgtcgggttagcgttcacatcttactatgcaagtagagctgccttggggcttcctttcgagttgcgtccatcatttagttttatcattgcctttatgaccgtatttggactagttatcgcattcgcaaaggacatttctgacatagagggggatgcaaaatacggtgtctccactgtggcgacaaaattaggagctaggaatatgactcgattgtgttccggtctattattactaaattatctgggcgcaatattggcaggcatcatatggccgcaagcttttaactccaacgttatgatactgagtcatgctattttggctttttgtctgatttttcagacgcgtgagttggcgcttgcaaactatgcctctgcgcccagcaggcagttttttgaattcatatggaatttgtactatgccgagtatcttgtctacgtatttatt

SEQ ID NO: 1156 - DNA, 969 bp, Artificial Sequence
  Synthetic
atgtctgctggctctgaccaaattgaaggttccccgcatcacgaatcagataatagtattgccacaaagatcttaaactttgggcatacattctggaaattacaaaggccctacgtcgtcaaaggagtgatactcatcgcttgcatactgttcggaaaggaattactacataatacgaacctaattagctggtcgttaatgtttaaagctttcgttgcgttagtgccaatcctaagctttaacgcattcgccgccatcgtaaaccagatttatgatgttgagatcgacaggataaataagccagatcttccattggcatccggtgaaatgtcaatacgtactgcatggatattatctattatcgttgcgctgaccggactgatattgacaatcaaaatgaaaggcggtcccctgtttgttgtattgtatatattgggtattttcgctggattcgcttactcagtgccacctatcaggtggaagcagtacccattcacgaattttctgatcacgatctctagccacgtcgggttagcgttcacatcttactatgcaagtcgagcagccttggggcttcctttcgagttgcgtccatcgtttagttttatcattgcctttatgaccgtaatgagtatgacgatcgcattcgcaaaggacatttctgacatagagggggataaaaaatacggtgtctccactttagcgacaaaattaggagctaagaatatgacttgggtggtgtccggtgtattattactaaattatgttgtagctatattggctggcatcatatggccgtttgcatttaactccaacgtcatgatactgagtcatattattttggctttttggctgatttttagaacgcgtgagttggcgcttgcaaactatgcctctgcgcccagcaggcagttttttgaattcatatggttattgtactatgccgagtatcttgtctacgtatttatt

SEQ ID NO: 1157 - DNA, 969 bp, Artificial Sequence
  Synthetic
atgtctgctggctctgaccaaattgaaggttccccgcatcacgaatcagataatagtattgccacaaagatcttaaactttgggcatacattctggaaattacaaaggccctacgtcgtcaaaggacttatatttatcgcttgcggtctgttcggaaaggaattactacacaatactaacctaataagctggtcgttaatgtttaaagctttcttcgcgttaattccaatcctaagctttaactttttcgccgccgtggtaaaccagatttatgatgttgagatcgacaggataaataagccagatcttccaattgcatccggtgaaatgtcaatagaaactgcatggatattatctattatcgttgcgctgaccggactgatagtaacaatcaaaatgaaaggcggtcccctgctcacggttatatatatattgggtcttttcgctggattcatttactcagtgccacctatcaggtggaagcagtacccattcacgaattttctgatcattatctctagccacgtcttgttacctttcacatcttactatgcaagtagagctgccttggggcttcctttcgagttgcgtccaagttttagttttatcattgcctttgttaccgtaatgggaatgacgatcgcattcgcaaaggacatttctgacatagagggggatcgcaaatacggtgtctccactttggcgacaaaattaggagctaggaatatgactcgagtgggctccggtgtattattactaaattatctggtagctatattggcaggcatcatatggccgcaagcatttaactccaacgttatgatactgagtcatgctattttggctttttgtctgatttttcagacgcgtgagttggcgcttgcaaactatgcctctgcgcccagcaggcagttttttgaattcatatggaatttgtactatgccgagtatttggtctacgtatttatt

SEQ ID NO: 1158 - DNA, 969 bp, Artificial Sequence
  Synthetic
atgtctgctggctctgaccaaattgaaggttccccgcatcacgaatcagataatagtattgccacaaagatcttaaactttgggcatacattctggaaattacaaaggccctacgtcgtcaaaggagtaataagcatcgcttgcggtctgttcggaaaggaattattgcacaataccaacctaataagctggtcattaatgtttaaagctttcttcgcgttagtgccaatcctaagctttaactttttcgccgccatcgttaaccagatttatgatgttgagatcgacaggataaataagccagatcttccattggtatccggtgaactctcaatacgcactgcatggatattatctattatcgttgcgctgaccggactgatagtaacaatcaaaatgaaagggggccccctgcttactagtatatatatattgggtattttcgctggattcgcttactcagtgccacctatcaggtggaagcagtacccattcacgaattttattatcacgttgtctagccacgtcttgttagcgttcacatcttactatgcatcgagagctgccttggggcttcctttcgagttgcgtccatcatttagttttatcattgcctttatgaccgtaatgggaatgacgatcgcattcgcaaaggacatttctgacatagagggggataaaaaatacggtgtctccacttttgcgacaaaattaggagctaggaatatgacttggatttgttccggtttgttaattctaaattatgttggtgcaatactcgctggcatcatatggccgtttgcatttaattccaacgttatgatactgagtcatgctattttggctttttgtctgatttttagaacgcgtgagttggcgcttgcaaactatgcctctgcgcccagcaggcagttttttgaattcatatggttattgtactatgccgagtatctagtctacgtatttatt

SEQ ID NO: 1159 - DNA, 969 bp, Artificial Sequence
  Synthetic
atgtctgctggctctgaccaaattgaaggttccccgcatcacgaatcagataatagtattgccacaaagatcttaaactttgggcatgcgttctggaaattacaaaggccctacgtcgtcaaaggacttataagcatcgcttgcggtctgttcggaaaggaattattgcacaatactaacctaattagctggtcgttaatgtttaaagctttcttcgcgttagtgccaatcctaagctttaactttttcgccgccgcaataaaccagatttatgatgttgagatcgacaggataaataagccagatcttccattggtatccggtgaaatgtcaataagaactgcatggatattatctattatcgttgcgctgaccggactgatattgacaatcaaaatgaaaggtgggcccctgtttgtttttttgtatatatttggtctcttcgctggattcttttactcagtgccacctatcaggtggaagcagtacccattcacgaattttctgatcattatctctagccacgtcttattagcgttcacatcttactatgcatcccgcgccgccttggggcttcctttcgagttgcgtccaagttttagttttatcattgcctttatgaccgtattctcaatggttatcgcattcgcaaaggacatttctgacatagagggggataaaaaatacggtgtctccactcttgcgacaaaattaggagctaagaatatgactagaattgtgtccggtgtattattactaaattatctggtagctatacttgcaggcatcatatggccgtttgcttttaattccaacgttatgatactgagtcatgctattttggctttttggctgatttttagaacgcgtgagttggcgcttgcaaactatgcctctgcgcccagcaggcagttttttgaattcatatggttattgtactatgccgagtatcttgtctacgtatttatt

SEQ ID NO: 1160 - DNA, 969 bp, Artificial Sequence
  Synthetic
atgtctgctggctctgaccaaattgaaggttccccgcatcacgaatcagataatagtattgccacaaagatcttaaactttgggcatgcgttctggaaattacaaaggccctacgtcataaaaggactcatattgggtgcttgctcgctgttcggaaaggaattattgcacaataccaacctaattagctggtcattaatgtttaaagctttcttcgcgttagtgccaatcctaagctttaactttttcgccgccgcaatgaaccagatttatgatgttgagatcgacaggataaataagccagatcttccattggcatccggtgaactgtcaatacgtactgcatggatattatctattatcgttgcgctgaccggactgataattacaatcaaaatgaaaggcggtcccctgtttgtttttatatatatatttggtcttttcttgggattcgcttactcagtgccacctatcaggtggaagcagtacccattcacgaattttctgatcattatctctagccacgtcgggttagcgttcacatcttactatgcaagtagagctgccttggggcttcctttcgagctccgtccatcatttagttttatcattgcctttatgaccgtaatgtccttggtaatcgcattcgcaaaggacatttctgacatagagggggatcgaaaatacggtgtctccactctagcgacaaaattaggagctaggaatatgactagagtggtgtccggtctcttattactaaattatctggtatctatattggctggcatcatatggccgtttgcttttaactccaacgttatgatactgagtcatgctattttggctttttgtctgatttttcgcacgcgtgagttggcgcttgcaaactatgcctctgcgcccagcaggcagttttttgaattcatatggttattgtactatgccgagtatcttgtctacgtatttatt

SEQ ID NO: 1161 - DNA, 969 bp, Artificial Sequence
  Synthetic
atgtctgctggctctgaccaaattgaaggttccccgcatcacgaatcagataatagtattgccacaaagatcttaaactttgggcatgcgtgttggaaattacaaaggccctacgtcgtcaaaggacttataagcatcgcttgcggtctgttcggaaaggaattactacataatactaacctaattagctggtcgttaatgtttaaagctttcttcgcgttagtgccaatcctattgtttaactttttcgccaatgcaatgaaccagatttatgatgttgagatcgacaggataaataagccagatcttccattggtatccggtgaaatgtcaatacgcactgcatggatattatctattatcgttgcgctgaccggactgataattacaatcaaaatgaaaggtggccccctgttggtttttatatatatatttggtttgttcctcggattcgcttactcagtgccacctatcaggtggaagcagtacccattcacgaattttctgatcattatctctagccacgtcgggttagcgttcacagtatactatgcaagtcgtgcagccttggggcttcctttcgagttgcgtccatcctttagttttatcattgcctttatgaccgtaatgagtatgacgatcgcattcgcaaaggacatttctgacatagagggggatgcaaaatttggtgtctccactgtggcgacaaaattaggagttaaaaatactactagagtgtgttccggtttattattactaaattatctggtatctatattggctggcatcatatggccgtttgcttttaactccaacgttatgatactgagtcatgctattttggcttttattctgatttttcgaacgcgtgagttggcgcttgcaaactatgcctctgcgcccagcaggcagttttttgaattcatatggaatttgtactatgccgagtatcttgtctacgtatttatt

SEQ ID NO: 1162 - DNA, 969 bp, Artificial Sequence
  Synthetic
atgtctgctggctctgaccaaattgaaggttccccgcatcacgaatcagataatagtattgccacaaagatcttaaactttgggcatacattctggaaatttcaaaggccctacgtcgtcaaaggattgataagcatcgcttgcggtctgttcggaaaggaattacttcataatacgaacctaattagctggtcattaatgtttaaagctttcttcgcgttagtgccaatcctaagctttaactttttcgccgccgcaatgaaccagatttatgatgttgagatcgacaggataaataagccagatcttccattggcatccggtgaaatgtcaataagaactgcatggataatttctattatcgttgcgctgaccggactgatagtaacaatcaaaatgaaaggcgggcccctgtttgtttgtatatatatatttggtttgttcttgggagctgcttactcagtgccacctatcaggtggaagcagtacccattcacgaattttctgatcacgatctctgtacacgtcgggttagcgttcacagtttactatgcatcgagagcagccttggggcttcctttcgagctccgtccaagttttagttttatcattgcctttgtgaccgtaatgagtatgacgatcgcattcgcaaaggacatttctgacatagagggggataaaaaatacggtgtctccactgtggcgacaaaattaggagctaaaaatatgactcgcgctgtgtccggtgtattattactaaattatgtagtagctatattggcgggcatcatatggccgtttgcctttaactccaacgttatgatactgagtcatgctattttggcttttgttctgatttttagaacgcgtgagttggcgcttgcaaactatgcctctgcgcccagcaggcagttttttgaattcatatggttattgtactatgccgagtatctagtctacgtatttatt

SEQ ID NO: 1163 - DNA, 969 bp, Artificial Sequence
  Synthetic
atgtctgctggctctgaccaaattgaaggttccccgcatcacgaatcagataatagtattgccacaaagatcttaaactttgggcatacatgttggaaattacaaaggccctacgtcataaaaggactcatactaatcgcttgcggtctgttcggaaaggaattacttcacaatacgaacctaattagctggtcgttaatgtttaaagctttcttcgcgttagtgccaatcctaagctttaactttttcgccgccgcaattaaccagatttatgatgttgagatcgacaggataaataagccagatcttccattggcatccggtgaaatgtcaataagaactgcatggatattatctattatcgttgcgctgaccggactgatagtaacaatcaaaatgaaaggcggtcccctgtttgtttttatatatatatttggtctattcttgggaactgcttactcagtgccacctatcaggtggaagcagtacccattcacggcttttctgatcattatcactagccacgtcgggttagcgttcacatcttactatgcaagtagagctgccttggggcttcctttcgagttgcgtccatcttttagttttatcattgcctttatgaccgtaatgggaatggttatcgcattcgcaaaggacatttctgacatagagggggataaaaaatacggtgtctccactgtggcgacaaaattaggagctaaaaataccactcggttgtgttccggtgtattattactaaattatgttgtatctatattggctggcatcatatggccgttcgcatttaactccaacgttatgatactgagtcatgctattttggctttttgtctgatttttcgaacgcgtgagttggcgcttgcaaactatgcctctgcgcccagcaggcagttttttgaattcatatggaatttgtactatgccgagtatctagtctacgtatttatt

SEQ ID NO: 1164 - DNA, 969 bp, Artificial Sequence
  Synthetic
atgtctgctggctctgaccaaattgaaggttccccgcatcacgaatcagataatagtattgccacaaagatcttaaactttgggcatacatgttggaaattacaaaggccctacgtcgtcaaaggactaataagcatcgcttgcggtctgttcggaaaggaattacttcataataccaacctaattagctggtcattaatgtttaaagctttcttcgcgttagtgccaatcctaagctttaacggtttcgccgccatcatgaaccagatttatgatgttgagatcgacaggataaataagccagatcttccattggtatccggtgaaatgtcaatacgcactgcatggatattatctattatcgttgcgctgaccggactgatagtaacaatcaaaatgaaaggcgggcccctgattgttagtctttatatatttggtttgttccttggattcgcttactcagtgccacctatcaggtggaagcagtacccattcacgaattttctgatcacgatctctagccacgtcgggttaaatttcacagtttactatgcatcccgtgcagccttggggcttcctttcgagttgcgtccatcatttagttttatcattgcctttatgaccgtaatgggaattacgatcgcattcgcaaaggacatttctgacgttgagggggatgcaaaatacggtatatccactttggcgacaaaattaggagtaaaaaatatgactagagtgtgttccggtgtattattactaaattatctggtagctatattggctggcatcatatggccgtttgcttttaacggtaacgttatgatactgagtcatgctattttggcttcgtgtctgatttttagaacgcgtgagttggcgcttgcaaactatgcctctgcgcccagcaggcagttttttgaattcatatggaaattgtactatgccgagtatttagtctacgtatttatt

SEQ ID NO: 1165 - DNA, 969 bp, Artificial Sequence
  Synthetic
atgtctgctggctctgaccaaattgaaggttccccgcatcacgaatcagataatagtattgccacaaagatcttaaactttgggcatacattctggaaattacaaaggccctacaccgtcaaaggagttataataatcgcttgcggtctgttcggaaaggaattacttcacaatactaacctaattaattggtcgttaatgtttaaagctttcttcgcgttagtgccaatcctaagctttaactttttcgccgccatcgtaaaccagatttatgatgttgagatcgacaggataaataagccagatcttccattggtatccggtgaaatgtcaatacgtactgcatggatattatctattatcgttgcgctgaccggactgatagtaacaatcaaaatgaaaggcggtcccctgctcacggtcatatatatattgggtattttcgctggattcatttactcagtgccacctatcaggtggaagcagtacccattcacgaattttctgatcacgatctctagccacgtcgggttagcgttcacagtgtactatgcaagtcgagctgccttggggcttcctttcgagttgagcccatcctttagttttatcactgcctttatgaccgtaatgggaatgacgatcgcattcgcaaaggacatttctgacatagagggggataaaaaatacggtgtctccactgtggcgacaaaattaggagctaaaaatatgacttgggcagtgtccggtgtattattactaaattatgttggcgctatattggcaggcatcatatggccgtttgcatttaactccaacgttatgatactgagtcatgctattttggctttttgtctgatttttcggacgcgtgagttggcgcttgcaaactatgcctctgcgcccagcaggcagttttttgaattcatatggttattgtactatgccgagtatctagtctacgtatttatt

SEQ ID NO: 1166 - DNA, 969 bp, Artificial Sequence
  Synthetic
atgtctgctggctctgaccaaattgaaggttccccgcatcacgaatcagataatagtattgccacaaagatcttaaactttgggcatacatgttggaaattacaaaggccctacgtcgtcaaaggactaatactgatcgcttgcggtctgttcggaaaggaattactccacaatacgaacctaataagctggtcgttaatgtttaaagctttcttcgcgttagtgccaatcctaagctttaactttttcgccgccgcaattaaccagatttatgatgttgagatcgacaggataaataagccagatcttccattggtatccggtgaaatgtcaatacgaactgcatggatattatctattatcgttgcgctgaccggactgatattgacaatcaaaatgaaaggcggtcccctgtttgtttttttgtatatatttggtcttttcttgggattcgcttactcagtgccacctatcaggtggaagcagtacccattcacgaattttctgatcattgtatctagccacgtcattttaaatttcacagtttactatgcaagtcgcgccgccttggggcttcctttcgagcttcgtccaagttttagttttatcaccgcctttatgaccgtattcggaatggtgatcgcattcgcaaaggacatttctgacatagagggggatgcaaaatacggtgtctccactctagcgacaaaattaggagctaaaaatatgactagagtggtgtccggtttgttattactaaattatctggtatctatattggcaggcatcatatggccgtttgcttttaactccaacgttatgatactgagtcatgctattttggctttttgtctgatttttagaacgcgtgagttggcgcttgcaaactatgcctctgcgcccagcaggcagttttttgaattcatatggaatttgtactatgccgagtatctagtctacgtatttatt

SEQ ID NO: 1167 - DNA, 969 bp, Artificial Sequence
  Synthetic
atgtctgctggctctgaccaaattgaaggttccccgcatcacgaatcagataatagtattgccacaaagatcttaaactttgggcatgcattctggaaattacaaaggccctacgtcgtcaaaggactaataagcggtgcttgcggtctgttcggaaaggaattattgcacaatactaacctaataagctggtcattaatgtttaaagctttcttcgcgttagtgccaatcctaagctttaactttttcgccgccgttgttaaccagatttatgatgttgagatcgacaggataaataagccagatcttccattggtatccggtgaaatttcaatagaaactgcatggatattatctattatcgttgcgctgaccggactgatattgacaatcaaaatgaaaggcggtcccctgcttgtttttatatatatattgggtttgttcctcggattcgcttactcagtgccacctatcaggtggaagcagtacccattcacgaattttctgatcattatctctagccacgtcctcttaaatttcacatcttactatgcaagtagagcagccttggggcttcctttcgagttgcgtccatcctttagttttatcattgcctttatgaccgtaatgggaatgacgatcgcattcgcaaaggacatttctgacatagagggggataaaaaatttggtgtctccactgtggcgacaaaattaggagctaagaatatgactagactttgttccggtttgttattactaaattatctggtatctatattagctggcatcttttggccgcaagcatttaactccaacgttatgatactgagtcatgctattttggctttttgtctgatttttcagacgcgtgagttggcgcttgcaaactatgcctctgcgcccagcaggcagttttttgaattcatatggaatttgtactatgccgagtatctcgtctacgtatttatt

SEQ ID NO: 1168 - DNA, 969 bp, Artificial Sequence
  Synthetic
atgtctgctggctctgaccaaattgaaggttccccgcatcacgaatcagataatagtattgccacaaagatcttaaactttgggcatacatgttggaaattacaaaggccctacgtcgtcaaaggactgatactcgcagcttgcggtctgttcggaaaggaattacttcataatactaatctaatcagctggtcgttaatgtttaaagctttcttcgcgttagtggccatcctaagctttaactttttcgccgccgcgataaaccagatttatgatgttgagatcgacaggataaataagccagatcttccattggcatccggtgaaatgtcaatacgaactgcatggatattatctattatcgttgcgctgaccggactgatagtaacaatcaaaatgaaaggcggccccctgtttgtttgtatatatatatttggtttgttcgctggaacgatttactcagtgccacctatcaggtggaagcagtacccattcacgaattttctgatcacgatctctagccacgtcgggttagcgttcacatcttactatgcaagtagagctgccttggggcttcctttcgagctacgtccaagttttagttttatcattgcctttgttaccgtaatgggattgacgatcgcattcgcaaaggacatttctgacatagagggggatcgcaaatacggtgtctccactttggcggctaaattaggagctaggaatattactagagtgtgctccggtgtattattactaaattatctggtagctatactagcaggcatcatatggccgtttgcttttaactccaacgttatgatactgagtcatgctattttggctttttgtctgatttttagaacgcgtgagttggcgcttgcaaactatgcctctgcgcccagcaggcagttttttgaattcatatggaatttgtactatgccgagtatctagtctacgtatttatt

SEQ ID NO: 1169 - DNA, 969 bp, Artificial Sequence
  Synthetic
atgtctgctggctctgaccaaattgaaggttccccgcatcacgaatcagataatagtattgccacaaagatcttaaactttgggcatacatgttggaaattccaaaggccctacaccgtcaaaggacttatactaatcgcttgcggtctgttcggaaaggaattactccacaatactaacctaattagctggtcgttaatgtttaaagctttcttcgcgttagtgccaatcctaagctttaacggtttcgccgccggtataaaccagatttatgatgttgagatcgacaggataaataagccagatcttccattggcatccggtgaaatgtcaataagaactgcatggatattatctattatcgttgcgctgaccggactgatagtaacaatcaaaatgaaaggcggtcccctgtttttttttatatatatatttggtttgttcgctggattcgcttactcagtgccacctatcaggtggaagcagtacccattcacgaattttctgatcattatctctagccacgtcgggttagcgttcacatcttactatgcaagtcgggcagccttggggcttcctttcgagttgcgtccaagttttagttttatcattgcctttatgaccgtaatgtcaatggctatcgcaattgcaaaggacatttctgacatagagggggatgcaaaatacggtgtctccactttggcgacaaaattaggagctaggaatgctactcgcttgtgttccggtgtattattactaaattatctggtatctatattggcaggcatcatatggccgtttgcctttaactccaacgttatgatactgagtcatgctattttggctttttggctgatttttcgaacgcgtgagttggcgcttgcaaactatgcctctgcgcccagcaggcagttttttgaattcatatggaaattgtactatgccgagtatcttgtctacgtatttatt

SEQ ID NO: 1170 - DNA, 969 bp, Artificial Sequence
  Synthetic
atgtctgctggctctgaccaaattgaaggttccccgcatcacgaatcagataatagtattgccacaaagatcttaaactttgggcatgcatgttggaaattacaaaggccctacgtcgtcaaaggactaataagcatcgcttgcggtctgttcggaaaggaattattgcacaataccaacctaattaattggtcgttaatgtttaaagctttcttcgcgttagtgccaatcctaagctttaactttttcgccgccgcaataaaccagatttatgatgttgagatcgacaggataaataagccagatcttccattggcatccggtgaaatgtcaatacgcactgcatggatattatctattatcgttgcgctgaccggactgatagtaacaatcaaaatgaaaggtggccccctgtttgtttttatatatatatttggtctcttcgctggaacggcttactcagtgccacctatcaggtggaagcagtacccattcacggcctttctgatcacgatctctagccacgtcgggttaaatttcacagtatactatgcaagtcgtgctgccttggggcttcctttcgagttgcgtccatcatttagttttatcattgcctttatgaccgtaatgggaattacgatcgcattcactaaggacatttctgacatagagggggatgcaaaatacggtgtctccactttggcgacaaaattaggagctaaaaatactactagattctgttccggtgtattattactaaattatctggtatctatattggctggcatcatatggccgtttgcctttaattccaacgttatgatactgagtcatgctattttggctttttggctgatttttcgaacgcgtgagttggcgcttgcaaactatgcctctgcgcccagcaggcagttttttgaattcatatggaatttgtactatgccgagtatcttgtctacgtatttatt

SEQ ID NO: 1171 - DNA, 969 bp, Artificial Sequence
  Synthetic
atgtctgctggctctgaccaaattgaaggttccccgcatcacgaatcagataatagtattgccacaaagatcttaaactttgggcatacatgttggaaattacaaaggccctacgtcgtcaaaggacttataagcggtgcttgcggtctgttcggaaaggaattactacacaatactaacctaatcagctggtcattaatgtttaaagctttcttcgcgttagtgccaatcctaagctttaactttttcgccgccgcaattaaccagatttatgatgttgagatcgacaggataaataagccagatcttccattggcatccggtgaaatttcaatacgtactgcatggatattatctattatcgttgcggtaaccggactgatagtaacaatcaaaatgaaaggcggtcccctgttggtttttatatatatatttggtttgttcgctggagccgcttactcagtgccacctatcaggtggaagcagtacccattcacgaattttctgatcattatctctagccacgtcgggttagcgttcacatcttactatgcatcacgagctgccttggggcttcctttcgagttgcgtccatcttttagttttatcattgcctttatgaccgtaatgagtatgacgatcgcattcgcaaaggacatttctgacatagagggggataaaaaatacggtgtctccactgtggcgacaaaattaggagctaggaatatgactagagtgtgttccggtctcttattactaaattatgttgtagctatattggcaggcatcatatggccgtttgcatttaattccaacgttatgatactgagtcatgctattttggcttttgttctgatttttcgcgctcgtgagttggcgcttgcaaactatgcctctgcgcccagcaggcagttttttgaattcatatggaatttgtactatgccgagtatttggtctacgtatttatt

SEQ ID NO: 1172 - DNA, 969 bp, Artificial Sequence
  Synthetic
atgtctgctggctctgaccaaattgaaggttccccgcatcacgaatcagataatagtattgccacaaagatcttaaactttgggcatgcgtgttggaaattacaaaggccctacgtcgtcaaaggactgataagcggtgcttgctcgctgttcggaaaggaattactccacaatacgaacctaattagctggtctttaatgtttaaagctttcttcgcgttagtgccaatcctaagctttaactttttcgccgccgcaataaaccagatttatgatgttgagatcgacaggataaataagccagatcttccattggtatccggtgaattgtcaataagaactgcatggatattatctattatcgttgcgctgaccggactgatagtaacaatcaaaatgaaaggtggtcccctgcttgttgggatatatatatttggtttgttcgctggattcgcttactcagtgccacctatcaggtggaagcagtacccattcacgaattttctgatcattgtaactagccacgtcgggttagcgttcacatcttactatgcaagtcgtgcagccttggggcttcctttcgagttgcgtccatcatttagttttatcattgcctttatgaccgtaatgggaatggcaatcgcattcgcaaaggacatttctgacatagagggggataaaaaatacggtatttccactgtggcgacaaaattaggagctaggaatgctactagagtgtgttccggtctattattactaaattatctggtatctatattggctggcatcatatggccgtttgcatttaactccaacgttatgatactgagtcatgctattttggctttttgtctgatttttagaacgcgtgagttggcgcttgcaaactatgcctctgcgcccagcaggcagttttttgaattcatatggaatttgtactatgccgagtatttggtctacgtatttatt

SEQ ID NO: 1173 - DNA, 969 bp, Artificial Sequence
  Synthetic
atgtctgctggctctgaccaaattgaaggttccccgcatcacgaatcagataatagtattgccacaaagatcttaaactttgggcatacattctggaaattacaaaggccctacgtcgtcaaaggagtgataagcatctcgtgcggtctgttcggaaaggaattactacataatactaacctaataagctggtcattaatgtttaaagctttcttcggtttagtgccaatcctatgttttaactttttcgccgccatcgtaaaccagatttatgatgttgagatcgacaggataaataagccagatcttccattggtatccggtgaaatgtcaatacgtactgcatggatattatctattatcgttgcgctgaccggactgataattacaatcaaaatgaaaggcgggcccctgtttgtttcaatatatatacttggtattttcttgggattcttgtactcagtgccacctatcaggtggaagcagtacccattcacgaattttctgatcattatctctagccacgtcgggttaaacttcacagtttactatgcaagtcgagctgccttggggcttcctttcgagttgcgtccaagttttagttttatcattgcctttatgaccgtatttggactcacgatcgcattcgcaaaggacatttctgacatagagggggatgcaaaatacggtgtctccactttagcgacaaaattaggagctaaaaatatgacttgggtgtgttccggtgtattattactaaattatctggtagctatattggcaggcatcatatggccgtttgcttttaattccaacgttatgatactgagtcatgctattttggctttttgtctgatttttagaacgcgtgagttggcgcttgcaaactatgcctctgcgcccagcaggcagttttttgaattcatatggttattgtactatgccgagtatcttgtctacgtatttatt

SEQ ID NO: 1174 - DNA, 969 bp, Artificial Sequence
  Synthetic
atgtctgctggctctgaccaaattgaaggttccccgcatcacgaatcagataatagtattgccacaaagatcttaaactttgggcatgcattctggaaattacaaaggccctacgtcgtcaaaggactgataagcatcgcttgctcgctgttcggaaaggaattacttcacaatactaacctaattagctggtcattaatgtttaaagctttcttcgcgttagtgccaatcctaagctttaactttttcgccgccgcaatgaaccagatttatgatgttgagatcgacaggataaataagccagatcttccattggtatccggtgaaatgtcaataagaactgcatggataatttctatttcggttgcgctgaccggactgatattgacaatcaaaatgaaaggtggtcccctgattgtttttctttatatatttggtttgttcgctggattcgcttactcagtgccacctatcaggtggaagcagtacccattcacgaattttctgatcacgatctctagccacgtcattttagcgttcacatcttactatgcaagtcgtgcagccttggggcttcctttcgagttgcgtccatcctttagttttatcattgcctttatgaccgtaatgtctatgacgatcgcattcgcaaaggacatttctgacatagagggggataaaaaatttggtgtctccactctcgcgacaaaattaggagctaaaaatatgactcgcatttgttccggtttgttattactaaattatctggtatctatattggctggcatcatatggccgtttgcttttaactccaacgttatgatactgagtcatgctattttggctttttgtctgatttttagaacgcgtgagttggcgcttgcaaactatgcctctgcgcccagcaggcagttttttgaattcatatggttattgtactatgccgagtatttagtctacgtatttatt

SEQ ID NO: 1175 - DNA, 969 bp, Artificial Sequence
  Synthetic
atgtctgctggctctgaccaaattgaaggttccccgcatcacgaatcagataatagtattgccacaaagatcttaaactttgggcatgcatgttggaaattacaaaggccctacgtcgtcaaaggattgatactcatcgcttgcggtctgttcggaaaggaattactacacaatacgaacctaattagctggtcgttaatgtttaaagctttcttcgcgttagtgccaatcctactctttaacggcttcgccgccatcatgaaccagatttatgatgttgagatcgacaggataaataagccagatcttccattggtatccggtgaaatgtcaataagaactgcatggatattatctattatcgttgcgctgaccggactgataattacaatcaaaatgaaaggtggccccctgtttgttagtttgtatatatttggtcttttcgctggattcgcttactcagtgccacctatcaggtggaagcagtacccattcacgaattttctgatcacgatctctagccacgtcattttaaatttcacagtttactatgcatccagagcagccttggggcttcctttcgagttgcgtccatcgtttagttttatcattgcctttatgaccgtaatgggaattacgatcgcattcgcaaaggacatttctgacatagagggggatgcaaaatacggtgtctccacttttgcgacaaaattaggagctaagaatatgactcgagtgtgttccggtttgttattactaaattatctggtagctatattggctggcatcatatggccgtttgcctttaattccaacgttatgatactgagtcatgctattttggctttttggctgatttttcgcacgcgtgagttggcgcttgcaaactatgcctctgcgcccagcaggcagttttttgaattcatatggaagttgtactatgccgagtatcttgtctacgtatttatt

SEQ ID NO: 1176 - DNA, 969 bp, Artificial Sequence
  Synthetic
atgtctgctggctctgaccaaattgaaggttccccgcatcacgaatcagataatagtattgccacaaagatcttaaactttgggcatgcgtgttggaaattacaaaggccctacgtcgtcaaaggactcataagcatcgcttgcggtctgttcggaaaggaattactacacaatactaacctaattagctggtcgttaatgtttaaagctttcttcgcgttagtgccaatcctaagctttaacggtttcgccgccatcatgaaccagatttatgatgttgagatcgacaggataaataagccagatcttccattggtatccggtgaaatgtcaatacgaactgcatggatattatctattatcgttgcgctgaccggactgataattacaatcaaaatgaaaggcggtcccctgtttacgtgtttgtatatatttggtcttttcgctggattcgcttactcagtgccacctatcaggtggaagcagtacccattcacgaattttctgatcacgatctctagccacgtcgggttaaatttcacagtttactatgcaagtagagcagccttggggcttcctttcgagttgcgtccatcatttagttttatcactgcctttatgaccgtaatgggaatgacgatcgcattcgcaaaggacatttctgacatagagggggatagaaaatacggtgtctccactatggcgacaaaattaggagctaggaataccactagaatttgttccggtttgttattactaaattatctggtagctatattggcaggcatcatatggccgtttgcttttaactccaacgttatgatactgagtcatgctattttggctttttggctgatttttcgcacgcgtgagttggcgcttgcaaactatgcctctgcgcccagcaggcagttttttgaattcatatggaaattgtactatgccgagtatctagtctacgtatttatt

SEQ ID NO: 1177 - DNA, 969 bp, Artificial Sequence
  Synthetic
atgtctgctggctctgaccaaattgaaggttccccgcatcacgaatcagataatagtattgccacaaagatcttaaactttgggcatacatgttggaaattacaaaggccctacgtcgtcaaaggactcataagcatcgcttgcggtctgttcggaaaggaattactacataataccaacctaataagctggtcattaatgtttaaagctttccaggcgttagtgccaatcctaagctttaacggtttcgccgccatcattaaccagatttatgatgttgagatcgacaggataaataagccagatcttccattggtatccggtgaaatgtcaataagaactgcatggatattatctattatcgttgcgctgaccggactgatagtaacaatcaaaatgaaagggggccccctgtttgtttttatatatatatttggtttgttcctcggattcgcttactcagtgccacctatcaggtggaagcagtacccattcacggcctttctgatcattatcttgagccacgtcgggttagcgttcacagtgtactatgcatcgcgcgctgccttggggcttcctttcgagttgcgtccatctttgagttttatcattgcctttatgaccgtaatgggaattacgatcgcattcgcaaaggacatttctgacatagagggggatgcaaaatacggtatatccacttttgcgacaaaattaggagctaggaatactactagaatttgttccggtcttttattactaaattatctggtagcaatattggctggcatcatatggccgtttgcatttaattccaacgttatgatactgagtcatgctattttggctttttgtctgatttttagaacgcgtgagttggcgcttgcaaactatgcctctgcgcccagcaggcagttttttgaattcatatggaagttgtactatgccgagtatttagtctacgtatttatt

SEQ ID NO: 1178 - DNA, 969 bp, Artificial Sequence
  Synthetic
atgtctgctggctctgaccaaattgaaggttccccgcatcacgaatcagataatagtattgccacaaagatcttaaactttgggcatgcatgttggaaattacaaaggccctacgtcataaaaggactaataagcatcgcttgcggtctgttcggaaaggaattactccacaatactaacctaattagctggtcgttaatgtttaaagctttcttcgcgttagtgccaatcctaagctttaacggtttcgccgccatcattaaccagatttatgatgttgagatcgacaggataaataagccagatcttccattggtatccggtgaaatgtcaatacgaactgcatggatattatctattatcgttgcgctgaccggactgatagtaacaatcaaaatgaaagggggccccctgtttgtttttatatatatatttggtttgttcgctggattcgcttactcagtgccacctatcaggtggaagcagtacccattcacgaattttctgatcattatcttgagccacgtcacattagcgttcacatcttactatgcaagtcgtgcagccttggggcttcctttcgagcttcgtccatcatttagttttatcattgcctttatgaccctaatgggattgacgatcgcattcgcaaaggacatttctgacatagagggggatgcaaaatttggtgtctccactttggcgacaaaattaggagctaaaaatatgactagaatttgttccggtattttattactaaattatctggtagcaatactcgctggcatcatatggccgtttgcttttaactccaacgtgatgatactgagtcatgctattttggctttttggctgatttttcgcacgcgtgagttggcgcttgcaaactatgcctctgcgcccagcaggcagttttttgaattcatatggaaattgtactatgccgagtatctcgtctacgtatttatt

SEQ ID NO: 1179 - DNA, 969 bp, Artificial Sequence
  Synthetic
atgtctgctggctctgaccaaattgaaggttccccgcatcacgaatcagataatagtattgccacaaagatcttaaactttgggcatgcatgttggaaattacaaaggccctacgtcgtcaaaggattgatactaatcgcttgcggtctgttcggaaaggaattacttcataatactaacctaataagctggagcttaatgtttaaagctttcttcgcgttagtgccaatcctaagctttaactttttcgccgccgcaatgaaccagatttatgatgttgagatcgacaggataaataagccagatcttccattggtatccggtgaaatgtcaatacgaactgcatggatattatctattatcgttgcgctgaccggactgatattgacaatcaaaatgaaaggtggccccctgtttgttgctctatatatatttggtttgttcttgggagcagcttactcagtgccacctatcaggtggaagcagtacccattcacggcgtttctgatcattatctctagccacgtcgggttaaatttcacatcttactatgcatcgcgcgctgccttggggcttcctttcgagttacgtccaagttttagttttatcattgcctttatgaccgtattcggaatggttatcgcattcgcaaaggacatttctgacatagagggggatgcaaaatacggtatttccactgtggcgacaaaattaggagctaagaatatgactagagtgtgttccggtttgttattactaaattatctggtatctatactagcgggcatcatatggccgtttgcctttaactccaacgttatgatactgagtcatgctattttggctttttgtctgatttttagaacgcgtgagttggcgcttgcaaactatgcctctgcgcccagcaggcagttttttgaattcatatggaatttgtactatgccgagtatttagtctacgtatttatt

SEQ ID NO: 1180 - DNA, 969 bp, Artificial Sequence
  Synthetic
atgtctgctggctctgaccaaattgaaggttccccgcatcacgaatcagataatagtattgccacaaagatcttaaactttgggcatgcattctggaaattacaaaggccctacacgataaaaggacttataagcatcgcttgcggtctgttcggaaaggaattattgcacaatactaacctaattagctggtcattaatgtttaaagctttcttcgcgttagtgccaatcctaagctttaactttttcgccaatgttgtaaaccagatttatgatgttgagatcgacaggataaataagccagatcttccattggtatccggtgaaatgtcaatagaaactgcatggatattatctattatcgttgcgctgaccggactgatattgacaatcaaaatgaaaggcggtcccctgtttacctttatatatatattgggtctattcgctggattcgcttactcagtgccacctatcaggtggaagcagtacccattcacgaattttctgatcacgatctctagccacgtcgggttagcgttcacagtctactatgcatcgagagcagccttggggcttcctttcgagttgcgtccaagttttagttttatcattgcctttgtaaccgtaatgtctatggttatcgcattcgcaaaggacatttctgacatagagggggatagaaaatacggtgtctccactctggcgacaaaattaggagctaggaatatgactcgactctgttccggtgtattattactaaattatctgggtgccatattggcaggcatcatatggccgcaagcttttaattccaacgttatgatactgagtcatgctattttggctttttgtctgatttttcagacgcgtgagttggcgcttgcaaactatgcctctgcgcccagcaggcagttttttgaattcatatggaacttgtactatgccgagtatttggtctacgtatttatt

SEQ ID NO: 1181 - DNA, 969 bp, Artificial Sequence
  Synthetic
atgtctgctggctctgaccaaattgaaggttccccgcatcacgaatcagataatagtattgccacaaagatcttaaactttgggcatgcgtgttggaaattacaaaggccctacgtcgtcaaaggactcatactaatcgcttgcagcctgttcggaaaggaattacttcataataccaacctaataagctggtcattaatgtttaaagctttcttcgcgttagtgccaatcctattgtttaactttttcgccgccgcaatgaaccagatttatgatgttgagatcgacaggataaataagccagatcttccattggtatccggtgaaatgtcaatacgaactgcatggatattatctattatcgttgcgctgaccggactgatagtaacaatcaaaatgaaaggcggtcccctgtttgtttttttgtatatatttggtttgttcttgggattcgcttactcagtgccacctatcaggtggaagcagtacccattcacggcatttctgatcattatctctagccacgtcgggttagcgttcacatcttactatgcatcgagagccgccttggggcttcctttcgagttgcgtccaagttttagttttatcattgcctttatgaccgtaatgtcgatggttatcgcattcgcaaaggacttatctgacatagagggggatgcaaaatacggtgtctccactcttgcgacaaaattaggagctaggaatatgactcgcatttgttccggtctcttattactaaattatgttgtatctatattggctggcatcatatggccgtttgcttttaactccaacgttatgatactgagtcatgctattttggctttttgtctgatttttagaacgcgtgagttggcgcttgcaaactatgcctctgcgcccagcaggcagttttttgaattcatatggaatttgtactatgccgagtatctcgtctacgtatttatt

SEQ ID NO: 1182 - DNA, 969 bp, Artificial Sequence
  Synthetic
atgtctgctggctctgaccaaattgaaggttccccgcatcacgaatcagataatagtattgccacaaagatcttaaactttgggcatacattctggaaattacaaaggccctacgtcgtcaaaggagtaataagcggtgcttgcggtctgttcggaaaggaattattgcacaataccaacctaataagctggtcgttaatgtttaaagctttcttcgcgttagtgccaatcctaagctttaactttttcgccgccatcgttaaccagatttatgatgttgagatcgacaggataaataagccagatcttccattggcatccggtgaaatgtcaataagaactgcatggatattatctattatcgttgcgctgaccggactgatagtaacaatcaaaatgaaaggcggtcccctgctcgttgtgctttatatattgggtattttcgctggattcgcttactcagtgccacctatcaggtggaagcagtacccattcacgaattttctgatcacgttgttgagccacgtcgggttagcgttcacagtttactatgcatctcgagcagccttggggcttcctttcgagttgcgtccaagttttagttttatcattgcctttatgaccgtaatgggattagttatcgcattcgcaaaggacctatctgacatagagggggatgcaaaatacggtgtctccactctcgcgacaaaattaggagctaggactatgacttgggtgtgttccggtgtattattactaaattatctgggttctatattggctggcatcatatggccgtttgcttttaatttgaacgttatgatactgagtcatgctattttggctttttgtctgatttttagaacgcgtgagttggcgcttgcaaactatgcctctgcgcccagcaggcagttttttgaattcatatggttattgtactatgccgagtatctcgtctacgtatttatt

SEQ ID NO: 1183 - protein, 390 aa, Cymbidium hybrid cultivar
MPSLESVKKSNRADGFASILAIGRANPENFIEQSTYPDFFFRVTNSEHLVNLKKKFQRICDKTAIRKRHFVWNEELLNANPCLGTFMDNSLNVRQEFAIREIPKLGAEAATKAIQEWGQPKSRITHLIFCTTSGMDLPGADYQLTQILGLNPNIERVMLYQQGCFAGGTTLRLAKCLAESRKGARVLVVCAETTAVLFRAPSEEHQDDLVTQALFADGASALIVGADPDETAHERASFVIVSTSQVLLPDSAGAIGGHVSEGGLIATLHRDVPQIVSKNVGKCLEEAFTPLGISDWNSIFWVPHPGGRAILDQVEERVGLKPEKLIVSRHVLAEYGNMSSVCVHFALDEMRKRSKKEGKATTGEGLDWGVLFGFGPGLTVETVVLHSVPI

SEQ ID NO: 1184 - DNA, 1173 bp, Artificial Sequence
  Synthetic
atgcccagtttagagtcagttaagaaatccaatcgtgccgacggcttcgcatcgattctggctataggtagagctaaccctgaaaactttatcgaacagtctacatatccagatttctttttcagagtcaccaatagcgaacaccttgtaaacctaaagaaaaagttccaaagaatttgcgacaagactgctatcaggaagcgtcattttgtgtggaacgaagaattgttgaatgccaacccatgtttgggtacgtttatggataactcattaaacgtcagacaagaatttgctattagagagattccaaaactaggtgctgaagctgccactaaggcaatccaagaatggggtcaaccaaagtccagaataacccacttgatcttctgtactacctctggaatggatttgccaggtgctgactaccaattgacccaaattctgggtttgaatcctaatattgagagggttatgttataccagcaaggttgtttcgctggtggtactactttgagattggccaaatgtttagccgaatctcgtaagggagctagagttttggttgtctgtgctgaaacaaccgctgttctattcagagcaccttccgaagaacatcaagatgatttagtaactcaagctttgttcgccgacggtgcttctgctcttatcgttggtgcagacccagacgagactgcccacgaaagagctagttttgttattgtctctacatctcaagtcttgttaccagatagcgctggtgctatcggcggtcatgtgtccgaaggtggtttgatcgccactttgcacagagatgttccacagatagttagcaaaaatgtcggtaagtgcttggaagaagcattcacccccttgggtattagtgattggaacagtattttttgggttccacacccaggaggtagagctattcttgaccaagtggaagaaagagtcggtttaaagcctgagaagttgatcgtatccagacatgtgttagccgaatatggcaacatgtcttctgtttgtgttcactttgctctggatgaaatgaggaagagatctaaaaaagaaggtaaggctacaaccggtgagggtttagactggggtgttttgttcggcttcggtccaggattaactgtcgaaaccgtcgttttgcactctgttccaatataa

SEQ ID NO: 1185 - protein, 321 aa, Artificial Sequence
  Synthetic
MAATTNQTEPPESDNHSVATKILNFGKACWKLQRPYTIIAFTSCACGLFGKELLHNTNLISWSLMFKAFFFLVAILCIASFTTTINQIYDLHIDRINKPDLPLASGEISVNTAWIMSIIVALFGLIITIKMKGGPLYIFGYCFGIFGGIVYSVPPFRWKQNPSTAFLLNFLAHIITNFTFYYASRAALGLPFELRPSFTFLLAFMKSMGSALALIKDASDVEGDTKFGISTLASKYGSRNLTLFCSGIVLLSYVAAILAGIIWPQAFNSNVMLLSHAILAFWLILQTRDFALTNYDPEAGRRFYEFMWKLYYAEYLVYVFI

1. A chimeric prenyltransferase (PT), wherein the chimeric PT comprises one or more portions of CsPT1, CsPT4, CsPT6, and/or CsPT7 and wherein the chimeric PT is capable of producing a CBG-type cannabinoid from a resorcylic acid.

2. The chimeric PT of claim 1, wherein the CBG-type cannabinoid and the resorcylic acid are: cannabigerolic acid (CBGA) and olivetolic acid; or cannabigerovarinic acid (CBGVA) and divaric acid (DA).

3.-6. (canceled)

7. The chimeric PT of claim 1, wherein the chimeric PT comprises multiple transmembrane helices, and wherein at least one transmembrane helix of the multiple transmembrane helices comprises both a portion of CsPT4 and a portion of CsPT1, CsPT6 or CsPT7.

8.-9. (canceled)

10. The chimeric PT of claim 1, wherein the chimeric PT comprises one or more of the following motifs:
(i)
(SEQ ID NO: 11)
MTVMGMT;
(ii)
(SEQ ID NO: 12)
[EV][LMW][RS]P[SAP]F[ST]F[IL][IL]AF;
(iii)
(SEQ ID NO: 13)
QFFEFIW;
(iv)
(SEQ ID NO: 14)
HNTNL;
(v)
(SEQ ID NO: 15)
TCWKL;
(vi)
(SEQ ID NO: 16)
M[IL]LSHAILAFC;
(vii)
(SEQ ID NO: 17)
HVG[LV][AN]FT[SCF]Y[YS]A[ST][RT][AS]A[LF];
(viii)
(SEQ ID NO: 18)
GLIVT;
(ix)
(SEQ ID NO: 19)
L[YH]Y AEY[LF]V;
(x)
(SEQ ID NO: 20)
KAFFAL;
(xi)
(SEQ ID NO: 21)
KLGARNMT;
(xii)
(SEQ ID NO: 22)
QAF[NK]SN;
(xiii)
(SEQ ID NO: 23)
LIFQT;
(xiv)
(SEQ ID NO: 24)
SIIVALT;
(xv)
(SEQ ID NO: 25)
MSIETAW;
(xvi)
(SEQ ID NO: 26)
VVSGV;
(xvii)
(SEQ ID NO: 27)
RPYVV;
(xviii)
(SEQ ID NO: 28)
KPDLP;
(xix)
(SEQ ID NO: 29)
RWKQY;
(xx)
(SEQ ID NO: 30)
FLITI;
(xxi)
(SEQ ID NO: 31)
DIEGD;
and
(xxii)
(SEQ ID NO: 32)
KYGVST.

11.-15. (canceled)

16. The chimeric PT of claim 1, wherein the chimeric PT comprises: X1-X2-X3-X4-X5-X6-X7-X8-X9-X10, wherein:
(i) The sequence of X1 comprises any of SEQ ID NOs: 33-39 or a sequence that comprises no more than 2 amino acid substitutions, insertions, additions or deletions relative to any one of SEQ ID NOs: 33-39;
(ii) The sequence of X2 comprises any of SEQ ID NOs: 40-46 or a sequence that comprises no more than 2 amino acid substitutions, insertions, additions or deletions relative to any one of SEQ ID NOs: 40-46;
(iii) The sequence of X3 comprises any of SEQ ID NOs: 47-53 or a sequence that comprises no more than 2 amino acid substitutions, insertions, additions or deletions relative to any one of SEQ ID NOs: 47-53;
(iv) The sequence of X4 comprises any of SEQ ID NOs: 54-60 or a sequence that comprises no more than 2 amino acid substitutions, insertions, additions or deletions relative to any one of SEQ ID NOs: 54-60;
(v) The sequence of X5 comprises any of SEQ ID NOs: 61-67 or a sequence that comprises no more than 2 amino acid substitutions, insertions, additions or deletions relative to any one of SEQ ID NOs: 61-67;
(vi) The sequence of X6 comprises any of SEQ ID NOs: 68-74 or a sequence that comprises no more than 2 amino acid substitutions, insertions, additions or deletions relative to any one of SEQ ID NOs: 68-74;
(vii) The sequence of X7 comprises any of SEQ ID NOs: 75-81 or a sequence that comprises no more than 2 amino acid substitutions, insertions, additions or deletions relative to any one of SEQ ID NOs: 75-81;
(viii) The sequence of X8 comprises any of SEQ ID NOs: 82-88 or a sequence that comprises no more than 2 amino acid substitutions, insertions, additions or deletions relative to any one of SEQ ID NOs: 82-88;
(ix) The sequence of X9 comprises any of SEQ ID NOs: 89-95 or a sequence that comprises no more than 2 amino acid substitutions, insertions, additions or deletions relative to any one of SEQ ID NOs: 89-95; and/or
(x) The sequence of X10 comprises any of SEQ ID NOs: 96-102 or a sequence that comprises no more than 2 amino acid substitutions, insertions, additions or deletions relative to any one of SEQ ID NOs: 96-102.

17. The chimeric PT of claim 1, wherein the chimeric PT comprises a sequence that is at least 85% identical to any one of SEQ ID NOs: 114, 116, 759, 760, 808, 844, 857, 982 and 998.

18. The chimeric PT of claim 17, wherein the chimeric PT comprises any one of SEQ ID NOs: 114, 116, 759, 760, 808, 844, 857, 982 and 998.

19. The chimeric PT of claim 17, wherein the chimeric PT comprises;
(i) an amino acid substitution relative to SEQ ID NO: 114 at one or more of the following positions within SEQ ID NO: 114: T30, C31, L34, M43, S45, F82, I86, M87, D94, E113, V140, I142, F145, I147, A149, I172, S182, G211, M212, V234, R241, F245, V247, V250, L256, S258, I264, Q267, Q288, and L311; or
(ii) an amino acid substitution relative to SEQ ID NO: 116 at one or more of the following positions within SEQ ID NO: 116: F82, D94, I147, T213, F245, and T254.

20. The chimeric PT of claim 19, wherein the chimeric PT comprises;
(i) one or more of the following amino acid substitutions relative to SEQ ID NO: 114: T30A, C31F, L34F, M43L, S45L, F82G, I86A, M87I, D94E, E113R, V140I, I142L, F145T, I147L, A149L, I172V, S182V, G211S, M212I, V234L, R241K, F245R, V247C, V250L, L256V, S258A, I264N, Q267F, Q288R, L311N, and L311K; or
(ii) one or more of the following amino acid substitutions relative to SEQ ID NO: 116: F82G, D94E, I147L, T213V, F245R, and T254N.

21.-24. (canceled)

25. A fusion protein comprising the chimeric prenyltransferase of claim 1, wherein the fusion protein further comprises a farnesyl pyrophosphate synthase.

26.-35. (canceled)

36. A host cell comprising the chimeric PT of claim 1.

37.-40. (canceled)

41. The host cell of claim 36, wherein the host cell is a yeast cell.

42. The host cell of claim 41, wherein the yeast cell is a Saccharomyces cell, a Yarrowia cell, a Komagataella cell, or a Pichia cell.

43.-47. (canceled)

48. A method comprising culturing the host cell of claim 36.

49.-71. (canceled)

72. The chimeric PT of claim 10, wherein the chimeric PT comprises all of the following motifs:
(i)
(SEQ ID NO: 11)
MTVMGMT;
(ii)
(SEQ ID NO: 13)
QFFEFIW;
(iii)
(SEQ ID NO: 15)
TCWKL;
(iv)
(SEQ ID NO: 17)
HVG[LV][AN]FT[SCF]Y[YS]A[ST][RT][AS]A[LF];
(v)
(SEQ ID NO: 18)
GLIVT;
(vi)
(SEQ ID NO: 19)
L[YH]YAEY[LF]V;
(vii)
(SEQ ID NO: 20)
KAFFAL;
(viii)
(SEQ ID NO: 24)
SIIVALT;
(ix)
(SEQ ID NO: 25)
MSIETAW;
(x)
(SEQ ID NO: 27)
RPYVV;
(xi)
(SEQ ID NO: 28)
KPDLP;
and
(xii)
(SEQ ID NO: 30)
FLITI.

73. The chimeric PT of claim 10, wherein the chimeric PT comprises all of the following motifs:
(i)
(SEQ ID NO: 11)
MTVMGMT;
(ii)
(SEQ ID NO: 12)
[EV][LMW][RS]P[SAP]F[ST]F[IL][IL]AF;
(iii)
(SEQ ID NO: 13)
QFFEFIW;
(iv)
(SEQ ID NO: 14)
HNTNL;
(v)
(SEQ ID NO: 16)
M[IL]LSHAILAFC;
(vi)
(SEQ ID NO: 17)
HVG[LV][AN]FT[SCF]Y[YS]A[ST][RT][AS]A[LF];
(vii)
(SEQ ID NO: 19)
L[YH]YAEY[LF]V;
(viii)
(SEQ ID NO: 21)
KLGARNMT;
(ix)
(SEQ ID NO: 24)
SIIVALT;
(x)
(SEQ ID NO: 26)
VVSGV;
(xi)
(SEQ ID NO: 27)
RPYVV;
(xii)
(SEQ ID NO: 28)
KPDLP;
(xiii)
(SEQ ID NO: 29)
RWKQY;
(xiv)
(SEQ ID NO: 30)
FLITI;
(xv)
(SEQ ID NO: 31)
DIEGD;
and
(xvi)
(SEQ ID NO: 32)
KYGVST.

74. A host cell that comprises a heterologous polynucleotide encoding a chimeric prenyltransferase (PT), wherein the chimeric PT comprises one or more portions of at least two different PTs, wherein the chimeric PT is capable of producing a CBG-type cannabinoid from a resorcylic acid, and wherein the chimeric PT comprises a sequence that is at least 85% identical to the sequence of any one of SEQ ID NOs: 114, 116, 759, 760, 808, 844, 857, 982 and 998.

75. The host cell of claim 74, wherein the chimeric PT comprises:
(i) an amino acid substitution relative to SEQ ID NO: 114 at one or more of the following positions within SEQ ID NO: 114: T30, C31, L34, M43, S45, F82, I86, M87, D94, E113, V140, I142, F145, I147, A149, I172, S182, G211, M212, V234, R241, F245, V247, V250, L256, S258, I264, Q267, Q288, and L311; or
(ii) an amino acid substitution relative to SEQ ID NO: 116 at one or more of the following positions within SEQ ID NO: 116: F82, D94, I147, T213, F245, and T254.

76. A host cell that comprises a heterologous polynucleotide encoding a chimeric prenyltransferase (PT), wherein the chimeric PT comprises one or more portions of at least two different PTs, wherein the chimeric PT is capable of producing a CBG-type cannabinoid from a resorcylic acid, and wherein the chimeric PT comprises a sequence that is at least 85% identical to the sequence of any one of SEQ ID NOs: 111, 114, 115, 118, 119 and 120.
